(19) United States
(12) Patent Application Publication
(10) Pub. No.: US 2024/0189430 A1
(43) Pub. Date: Jun. 13, 2024

(54) EXTRACELLULAR VESICLE LINKED TO A BIOLOGICALLY ACTIVE MOLECULE VIA AN OPTIMIZED LINKER AND AN ANCHORING MOIETY

(71) Applicant: LONZA SALES AG, Basel (CH)

(72) Inventors: Aaron NOYES, Cambridge, MA (US); Eric ZHANG, Cambridge, MA (US); Wendy BROOM, Cambridge, MA (US); Chris WARREN, Cambridge, MA (US); Yaozhong ZHANG, Cambridge, MA (US); Erika ROSE, Cambridge, MA (US)

(21) Appl. No.: 18/546,131

(22) PCT Filed: Feb. 17, 2022
(86) PCT No.: PCT/US2022/016870

§ 371 Date: Aug. 11, 2023

Related U.S. Application Data
(60) Provisional application No. 63/150,523, filed on Feb. 17, 2021.

(51) Int. Cl. A61K 47/54; A61K 47/55; A61K 47/65; A61K 47/69

(52) U.S. Cl. CPC A61K 47/549; A61K 47/542; A61K 47/551; A61K 47/554; A61K 47/65; A61K 47/6911

(57) ABSTRACT

The present disclosure relates to extracellular vesicles (e.g., exosomes) comprising a biologically active molecule covalently linked to the extracellular vesicle via an optimized linker and an anchoring moiety, which may be useful as an agent for the prophylaxis or treatment of cancer or other diseases. Also provided herein are methods for producing the extracellular vesicles and methods for using the extracellular vesicles to treat diseases or disorders.

### CROSS REFERENCE TO RELATED APPLICATIONS

[0001] This PCT application claims the priority benefit of U.S. Provisional Application No. 63/150,523 filed Feb. 17, 2021; which is incorporated herein by reference in its entirety.

### REFERENCE TO SEQUENCE LISTING SUBMITTED ELECTRONICALLY VIA EFS-WEB

[0002] The content of the electronically submitted sequence listing (Name: 4000.125PC01_Seqlisting_ST25.txt, Size: 766,399 bytes; and Date of Creation: Feb. 17, 2022) submitted in this application is incorporated herein by reference in its entirety.

### TECHNICAL FIELD

[0003] The present disclosure provides extracellular vesicles (EVs), e.g., exosomes, which can be useful as an agent for the prophylaxis or treatment of cancer and other diseases comprising at least one biologically active molecule linked to the extracellular vesicle, e.g., exosome, via an optimized linker and an anchoring moiety.

### BACKGROUND

[0004] Many bioactive compounds have potent biological activity that is of therapeutic interest. However, these compounds often exhibit toxicity in non-target organs. One way to limit exposure of non-target tissues is to chemically conjugate small molecules to affinity-based reagents such as antibodies, which can direct the therapeutic compound to specific cell types (Dosio, F. et al., Toxins (Basel) 3(7):848-883 (2011)), but this approach is limited by the number of molecules of the compound of interest that can be attached to an antibody (typically 2-6 molecules per antibody), and by the availability/existence of antibodies that specifically bind to targeted, relevant diseased/effector cells without binding to non-target cells. These two issues limit the use of antibody-drug conjugates (ADC) by decreasing potency and increasing systemic toxicity, respectively. Accordingly, there is a need for delivery systems with a higher payload than ADCs that can selectively target specific tissues or organs while at the same time limiting overall systemic exposure to the therapeutic compound.

[0005] EVs, e.g., exosomes, are important mediators of intercellular communication. They are also important biomarkers in the diagnosis and prognosis of many diseases, such as cancer. As drug delivery vehicles, EVs, e.g., exosomes, offer many advantages over traditional drug delivery methods (e.g., peptide immunization, DNA vaccines) as a new treatment modality in many therapeutic areas. However, despite its advantages, many EVs, e.g., exosomes, have had limited clinical efficacy. For example, dendritic-cell derived exosomes (DEX) were investigated in a Phase II clinical trial as maintenance immunotherapy after first line chemotherapy in patients with inoperable non-small cell lung cancer (NSCLC). However, the trial was terminated because the primary endpoint (at least 50% of patients with progression-free survival (PFS) at 4 months after chemotherapy cessation) was not reached. Besse, B., et al., Oncoimmunology 5(4): e1071008 (2015).

[0006] Accordingly, new and more effective engineered-EVs, e.g., exosomes, are necessary to better enable therapeutic use and other applications of EV-based technologies.

### BRIEF SUMMARY

[0007] The present disclosure provides an extracellular vesicle (EV) comprising a biologically active molecule (BAM) covalently linked to the EV via an anchoring moiety (AM) according to the formula [AM]-L₁-[SP₁]-L₂-[SP₂]-L₃-[BAM] (Formula 1), wherein: [AM] is the anchoring moiety; L₁ is a cleavable or non-cleavable linkage; L₂ and L₃ are optional cleavable or non-cleavable linkages; SP₁ is an optional first spacer; and, SP₂ is an optional second spacer.

[0008] In some aspects, the anchoring moiety [AM] comprises a sterol, a lipid, a vitamin, a peptide, or a combination thereof and optionally a spacer. In some aspects, the optional spacer is an alkyl spacer. In some aspects, the alkyl spacer is C1, C2, C3, C4, C5, C6, C7, C8, C9, C10, C11, C12, C13, C14, or C15. In some aspects, the alkyl spacer is C6 or C8. In some aspects, the optional spacer is a glycol spacer. In some aspects, the glycol spacer has 2 (diethylene glycol), 3 (triethylene glycol), 4 (tetraethylene glycol; TEG), 5 (pentaethylene glycol), 6 (hexaethylene glycol; HEG), 7, 8, 9, 10, 11, 12, 13, 14, or 15 glycol units. In some aspects, the glycol spacer is tetraethylene glycol (TEG).

[0009] In some aspects, the sterol is selected from the group consisting of cholesterol, ergosterol, 7-dehydrocholesterol, 24S-hydroxycholesterol, lanosterol, cycloartenol, fucosterol, saringosterol, campesterol, β-sitosterol, sitostanol, coprostanol, avenasterol, and stigmasterol. In some aspects, the sterol is cholesterol. In some aspects, the lipid is a fatty acid. In some aspects, the fatty acid is a straight chain fatty acid. In some aspects, the fatty acid is a straight chain fatty acid, a branched fatty acid, an unsaturated fatty acid, a monounsaturated fatty acid, a polyunsaturated fatty acid, a hydroxyl fatty acid, a polycarboxylic acid, or any combination thereof. In some aspects, the straight chain fatty acid is butyric acid, caproic acid, caprylic acid, capric acid, lauric acid, myristic acid, palmitic acid, or stearic acid. In some aspects, the straight chain fatty acid is palmitic acid. In some aspects, the vitamin is vitamin E (tocopherol or tocotrienol), vitamin D, vitamin K, riboflavin, niacin, or pyridoxine. In some aspects, the vitamin is vitamin E (tocopherol or tocotrienol).

[0010] In some aspects, L₁ is a cleavable linkage comprising a phosphodiester bond or a non-cleavable linkage comprising a phosphorothioate bond. In some aspects, L₂ is an optional cleavable linkage comprising a phosphodiester bond or a non-cleavable linkage comprising a phosphorothioate bond. In some aspects, L₃ is an optional cleavable linkage comprising a phosphodiester bond or a non-cleavable linkage comprising a phosphorothioate bond. In some aspects, the SP₁ optional first spacer and/or the SP₂ an optional second spacer independently comprise an alkyl spacer, a glycol spacer, or a combination thereof. In some aspects, the alkyl spacer is C1, C2, C3, C4, C5, C6, C7, C8, C9, C10, C11, C12, C13, C14, or C15. In some aspects, the alkyl spacer is C3 or C6. In some aspects, the glycol spacer has 2 (diethylene glycol), 3 (triethylene glycol), 4 (tetraethylene glycol; TEG), 5 (pentaethylene glycol), 6 (hexaethylene glycol; HEG), 7, 8, 9, 10, 11, 12, 13, 14, or 15 glycol units. In some aspects, the glycol spacer is tetraethylene glycol (TEG) or hexaethylene glycol (HEG). In some aspects, each non-cleavable spacer is independently selected from alkyl, diethylene glycol, triethylene glycol, tetraethylene glycol (TEG), hexaethylene glycol (HEG), pentaethylene glycol, polyethylene glycol (PEG), glycerol, diglycerol, triglycerol, tetraglycerol (TG), pentaglycerol, a hexaglycerol (HG), polyglycerol (PG), succinimide, maleimide, or any combination thereof. In some aspects, the polyethylene glycol (PEG) is characterized by the formula R₁—(O—CH₂—CH₂)ₙ— or R₁—(O—CH₂—CH₂)ₙ—O—, wherein R1 is hydrogen, methyl or ethyl and n is an integer between 1 and 15. In some aspects, the polyglycerol (PG) is characterized by the formula ((R₁—O—(CH₂—CHOH—CH₂O)ₙ—), wherein R₁ is hydrogen, methyl or ethyl, and n is an integer between 1 and 15.

[0011] In some aspects, the L₁, L₂, or L₃ cleavable linkage, or any combination thereof comprises a redox cleavable linker, a reactive oxygen species cleavable linker, a pH dependent cleavable linker, an enzymatic cleavable linker, a protease cleavable linker, an esterase cleavable linker, a phosphatase cleavable linker, a photoactivated cleavable linker, a self-immolative linker, or any combination thereof. In some aspects, the L₁, L₂, or L₃ cleavable linkage, or any combination thereof comprises a self-immolative linker. In some aspects, the L₁, L₂, or L₃ cleavable linkage, or any combination thereof comprises a cinnamyl group, a naphthyl group, a biphenyl group, a heterocyclic ring, a homoaromatic group, coumarin, furan, thiophene, thiazole, oxazole, isoxazole, pyrrole, pyrazole, pyridine, imidazone, triazole, or any combination thereof.

[0012] In some aspects, the L₁, L₂, or L₃ cleavable linkage, or any combination thereof has the formula: -Aa-Yy- wherein each -A- is independently an amino acid unit or a combination thereof, a is independently an integer from 1 to 15; -Y- is a spacer unit, and y is 0, 1, or 2. In some aspects, -Aa- is a dipeptide, a tripeptide, a tetrapeptide, a pentapeptide, or a hexapeptide, or a combination thereof, wherein each dipeptide, tripeptide, tetrapeptide, pentapeptide, or hexapeptide in the combination can be the same or different. In some aspects, a is 2 and -Aa- is selected from the group consisting of valine-alanine, valine-citrulline, phenylalanine-lysine, N-methylvaline-citrulline, cyclohexylalanine-lysine, glutamic acid-valine-citrulline, and beta-alanine-lysine. In some aspects, -Aa- is valine-alanine, valine-citrulline, or glutamic acid-valine-citrulline. In some aspects, y is 1. In some aspects, -Y- is a self-immolative spacer. In some aspects, -Yy- has the formula:

[chemical structure]

[0013] wherein each R₂ is independently C₁₋₈ alkyl, —O—(C₁₋₈ alkyl), halogen, nitro, or cyano; and m is an integer from 0 to 4. In some aspects, m is 0, 1, or 2. In some aspects, m is 0.

[0014] In some aspects, L₁, L₂, or L₃ cleavable linkage, or any combination thereof comprises valine-alanine-p-aminobenzylcarbamate or valine-citrulline-p-aminobenzylcarbamate. In some aspects, -Y- is a non self-immolative spacer. In some aspects, the non self-immolative spacer is -Gly- or -Gly-Gly-.

[0015] In some aspects, the anchoring moiety [AM] comprises a scaffold protein. In some aspects, the anchoring moiety [AM] and/or the scaffold moiety is Scaffold X. In some aspects, the Scaffold X is selected from the group consisting of prostaglandin F2 receptor negative regulator (the PTGFRN protein); basigin (the BSG protein); immunoglobulin superfamily member 2 (the IGSF2 protein); immunoglobulin superfamily member 3 (the IGSF3 protein); immunoglobulin superfamily member 8 (the IGSF8 protein); integrin beta-1 (the ITGB1 protein); integrin alpha-4 (the ITGA4 protein); 4F2 cell-surface antigen heavy chain (the SLC3A2 protein); a class of ATP transporter proteins (the ATP1A1, ATP1A2, ATP1A3, ATP1A4, ATP1B3, ATP2B1, ATP2B2, ATP2B3, ATP2B4 proteins); a functional fragment thereof; and any combination thereof. In some aspects, the Scaffold X is PTGFRN protein or a functional fragment thereof. In some aspects, the Scaffold X comprises an amino acid sequence as set forth in SEQ ID NO:302. In some aspects, the Scaffold X comprises an amino acid sequence at least 50%, at least 60%, at least 70%, at least 80%, at least 85%, at least 90%, at least 95%, at least 96%, at least 97%, at least 98%, at least 99%, or about 100% identical to SEQ ID NO:302. In some aspects, the biologically active molecule [BAM] is linked via an anchoring moiety [AM] to the exterior surface of the EV. In some aspects, the biologically active molecule [BAM] is a polypeptide, a peptide, a polynucleotide (DNA and/or RNA), a chemical compound, or any combination thereof. In some aspects, the biologically active molecule [BAM] is a chemical compound. In some aspects, the chemical compound is a small molecule.

[0016] In some aspects, the biologically active molecule [BAM] comprises an antisense oligonucleotide (ASO), a siRNA, a miRNA, a shRNA, an mRNA, a nucleic acid, or any combination thereof. In some aspects, the biologically active molecule [BAM] comprises a peptide, a protein, an antibody or an antigen binding fragment thereof, or any combination thereof. In some aspects, the antigen binding fragment thereof comprises scFv, (scFv)2, Fab, Fab′, F(ab′)2, F(ab1)2, Fv, dAb, and Fd fragment, diabodys, antibody-related polypeptide, or any fragment thereof. In some aspects, the biologically active molecule [BAM] comprises an ASO. In some aspects, the ASO targets a transcript. In some aspects, the transcript is a STAT6 transcript, a CEBP/β transcript, a STAT3 transcript, a KRAS transcript, a NRAS transcript, an NLPR3 transcript, or any combination thereof. In some aspects, the EV is an exosome. In some aspects, the exosome is a native exosome. In some aspects, the exosome is a exosome overexpressing PTGFRN or a functional fragment thereof.

[0017] The present disclosure provides a pharmaceutical composition comprising an extracellular vesicle disclosed herein and a pharmaceutically acceptable carrier.

[0018] The present disclosure provides a kit comprising an EV or pharmaceutical composition disclosed herein and instructions for use.

[0019] The present disclosure provides a method of treating or preventing a disease or disorder in a subject in need thereof comprising administering an EV or pharmaceutical composition disclosed herein to the subject. In some aspects, the disease or disorder is a cancer, an inflammatory disorder, a neurodegenerative disorder, a central nervous disease, or a metabolic disease. In some aspects, the EV is administered intravenously, intraperitoneally, nasally, orally, intramuscularly, subcutaneously, parenterally, or intratumorally.

[0020] The present disclosure provides a method of attaching a biologically active molecule (BAM) to an EV, comprising linking an anchoring moiety (AM) to the EV, wherein the anchoring moiety (AM) is attached to the biologically active moiety (BAM) according to the formula: [AM]-L₁-[SP₁]-L₂-[SP₂]-L₃-[BAM] wherein: [AM] is the anchoring moiety; L₁ is a cleavable or non-cleavable linkage; L₂ and L₃ are optional cleavable or non-cleavable linkages; SP₁ is an optional first spacer; and, SP₂ is an optional second spacer.

[0021] In some aspects, [AM] is cholesterol-C6, cholesterol-TEG, tocopherol-C8, tocopherol, of palmitate-C6. In some aspects, L₁, L₂, or L₃, or a combination thereof is a phosphodiester bond. In some aspects, SP₁ is C3, C6, TEG, or HEG. In some aspects, L₁, L₂, or L₃, or a combination thereofis a phosphorothioate bond. In some aspects, SP₂ is C3, C6, TEG or HEG. In some aspects, L₁, L₂, or L₃, or a combination thereof is a phosphorothioate bond. In some aspects, [BAM] is an antisense oligonucleotide (ASO).

[0022] The present disclosure provides a method of increasing the load density of a biologically active molecule (BAM) attached to an EV, comprising screening a library of anchoring moieties (AM) attached to the biologically active moiety (BAM) according to the formula: [AM]-L₁-[SP₁]-L₂-[SP₂]-L₃-[BAM] wherein: [AM] is the anchoring moiety; L₁ is a cleavable or non-cleavable linkage; L₂ and L₃ are optional cleavable or non-cleavable linkages; SP₁ is an optional first spacer; and, SP₂ is an optional second spacer.

[0023] In some aspects, [AM] is cholesterol-C6, cholesterol-TEG, tocopherol-C8, tocopherol, of palmitate-C6. In some aspects, L₁, L₂, or L₃, or a combination thereof is a phosphodiester bond. In some aspects, SP₁ is C3, C6, TEG, or HEG. In some aspects, L₁, L₂, or L₃, or a combination thereof is a phosphorothioate bond. In some aspects, SP₂ is C3, C6, TEG or HEG. In some aspects, L₁, L₂, or L₃, or a combination thereof is a phosphorothioate bond. In some aspects, [BAM] is an antisense oligonucleotide (ASO). In some aspects, the load density of a biologically active molecule (BAM) attached to an EV is increased at least about 1-fold, at least about 1.5-fold, at least about 2-fold, at least about 2.5-fold, at least about 3-fold, at last about 4-fold, at least about 5-fold, at least about 6-fold, at least about 7-fold, at least 8-fold, at least about 9-fold, or at least about 10-fold.

[0024] The present disclosure provides an extracellular vesicle (EV) comprising an antisense oligonucleotide [ASO] covalently linked to the EV via an anchoring moiety [AM] according to the formula: [AM]-L₁-[SP₁]-L₂-[SP₂]-L₃-[ASO] wherein: [AM] is the anchoring moiety selected from the group consisting of cholesterol-C6, cholesterol-TEG, tocopherol-C8, tocopherol, and palmitate-C6; L₁ is a phosphodiesterase cleavable linkage; SP₁ is an optional first spacer selected from the group consisting of C3, C6, TEG and HEG; L₂ is optional phosphorothioate non-cleavable linkage; SP₂ is an optional second spacer selected from the group consisting of C3, C6, TEG, and HEG; and, L₃ is an optional phosphorothioate non-cleavable linkage.

[0025] In some aspects, the EV is an exosome. In some aspects, the exosome is a native exosome. In some aspects, the load density of ASO attached to the exosome is increased by at least about 1.5-fold. In some aspects, the anchoring moiety [AM] is cholesterol-C6. In some aspects, the average number of ASO molecules per exosome is 5032+/−386. In some aspects, the average number of ASO molecules per exosome is between about 4500 and about 5500. In some aspects, the average number of ASO molecules per exosome is between about 4500 and about 4600, between about 4600 and about 4700, between about 4700 and about 4800, between about 4800 and about 4900, between about 4900 and about 5000, between about 5000 and about 5100, between about 5100 and about 5200, between about 5200 and about 5300, between about 5300 and about 5400, or between about 5400 and about 5500. In some aspects, the average number of ASO molecules per exosome is at least about 4500, at least about 4600, at least about 4700, at least about 4800, at least about 4900, at least about 5000, at least about 5100, at least about 5200, at least about 5300, at least about 5400, or at least about 5500. In some aspects, the loading efficiency is 73% to 93%. In some aspects, the loading efficiency is between about 70% and about 95%. In some aspects, the loading efficiency is between about 70% and about 75%, between about 75% and about 80%, between about 80% and about 85%, between about 85% and about 90%, or between about 90% and about 95%. In some aspects, the loading efficiency is at least about 70%, at least about 75%, at least about 80%, at least about 85%, at least about 90%, or at least about 95%. In some aspects, the anchoring moiety [AM] is cholesterol-TEG. In some aspects, the average number of ASO molecules per exosome is 3991+/−490. In some aspects, the average number of ASO molecules per exosome is between about 3500 and about 4500. In some aspects, the average number of ASO molecules per exosome is between about 3500 and about 3600, between about 3600 and about 3700, between about 3700 and about 3800, between about 3800 and about 3900, between about 3900 and about 4000, between about 4000 and about 4100, between about 4100 and about 4200, between about 4200 and about 4300, between about 4300 and about 4400, or between about 4400 and about 4500. In some aspects, the average number of ASO molecules per exosome is at least about 3500, at least about 3600, at least about 3700, at least about 3800, at least about 3900, at least about 4000, at least about 4100, at least about 4200, at least about 4300, at least about 4400, or at least about 4500. In some aspects, the loading efficiency is 56% to 79%. In some aspects, the loading efficiency is between about 50% and about 85%. In some aspects, the loading efficiency is between about 50% and about 55%, between about 55% and about 60%, between about 60% and about 65%, between about 65% and about 70%, between about 70% and about 75%, between about 75% and about 80%, or between about 80% and about 85%. In some aspects, the loading efficiency is at least about 50%, at least about 55%, at least about 60%, at least about 65%, at least about 70%, at least about 75%, at least about 80%, or at least about 85%. In some aspects, the anchoring moiety [AM] is tocopherol-C8, tocopherol, or palmitate-C6. In some aspects, the average number of ASO molecules per exosome is 4241+/−722. In some aspects, the average number of ASO molecules per exosome is between about 3500 and about 5000. In some aspects, the average number of ASO molecules per exosome is between about 3500 and about 3600, between about 3600 and about 3700, between about 3700 and about 3800, between about 3800 and about 3900, between about 3900 and about 4000, between about 4000 and about 4100, between about 4100 and about 4200, between about 4200 and about 4300, between about 4300 and about 4400, between about 4400 and about 4500, between about 4500 and about 4600, between about 4600 and about 4700, between about 4700 and about 4800, between about 4800 and about 4900, or between about 4900 and about 5000. In some aspects, the average number of ASO molecules per exosome is at least about 3500, at least about 3600, at least about 3700, at least about 3800, at least about 3900, at least about 4000, at least about 4100, at least about 4200, at least about 4300, at least about 4400, at least about 4500, at least about 4600, at least about 4700, at least about 4800, at least about 4900, or at least about 5000. In some aspects, the loading efficiency is 57% to 73%. In some aspects, the loading efficiency is between about 50% and about 80%. In some aspects, the loading efficiency is between about 50% and about 55%, between about 55% and about 60%, between about 60% and about 65%, between about 65% and about 70%, between about 70% and about 75%, or between about 75% and about 80%. In some aspects, the loading efficiency is at least about 50%, at least about 55%, at least about 60%, at least about 65%, at least about 70%, at least about 75%, or at least about 80%. In some aspects, the exosome is an exosome overexpressing PTGFRN. In some aspects, the load density of ASO attached to the exosome is increased by at least about 2-fold. In some aspects, the anchoring moiety [AM] is cholesterol-C6. In some aspects, the average number of ASO molecules per exosome is 2442+/−339. In some aspects, the average number of ASO molecules per exosome is between about 2000 and about 3000. In some aspects, the average number of ASO molecules per exosome is between about 2000 and about 2100, between about 2100 and about 2200, between about 2200 and about 2300, between about 2300 and about 2400, between about 2400 and about 2500, between about 2500 and about 2600, between about 2600 and about 2700, between about 2700 and about 2800, between about 2800 and about 2900, or between about 2900 and about 3000. In some aspects, the average number of ASO molecules per exosome is at least about 2000, at least about 2100, at least about 2200, at least about 2300, at least about 2400, at least about 2500, at least about 2600, at least about 2700, at least about 2800, at least about 2900, or at least about 3000. In some aspects, the loading efficiency is 27% to 46%. In some aspects, the loading efficiency is between about 25% and about 50%. In some aspects, the loading efficiency is between about 25% and about 30%, between about 30% and about 35%, between about 35% and about 40%, between about 40% and about 45%, or between about 45% and about 50%. In some aspects, the loading efficiency is at least about 25%, at least about 30%, at least about 35%, at least about 40%, at least about 45%, or at least about 50%. In some aspects, the anchoring moiety [AM] is cholesterol-TEG. In some aspects, the average number of ASO molecules per exosome is 1728+/−264. In some aspects, the average number of ASO molecules per exosome is between about 1400 and about 2100. In some aspects, the average number of ASO molecules per exosome is between about 1400 and about 1500, between about 1500 and about 1600, between about 1600 and about 1700, between about 1700 and about 1800, between about 1800 and about 1900, between about 1900 and about 2000, or between about 2000 and about 2100. In some aspects, the average number of ASO molecules per exosome is at least about 1400, at least about 1500, at least about 1600, at least about 1700, at least about 1800, at least about 1900, at least about 2000, or at least about 2100. In some aspects, the loading efficiency is 19% to 33%. In some aspects, the loading efficiency is between about 15% and about 35%. In some aspects, the loading efficiency is between about 15% and about 20%, between about 20% and about 25%, between about 25% and about 30%, or between about 30% and about 35%. In some aspects, the loading efficiency is at least about 15%, at least about 20%, at least about 25%, at least about 30%, or at least about 35%. In some aspects, the anchoring moiety [AM] is tocopherol-C8, tocopherol, or palmitate-C6. In some aspects, the average number of ASO molecules per exosome is 2979+/−1006. In some aspects, the average number of ASO molecules per exosome is between about 1900 and about 4000. In some aspects, the average number of ASO molecules per exosome is between about 1900 and about 2000, between about 2000 and about 2100, between about 2100 and about 2200, between about 2200 and about 2300, between about 2300 and about 2400, between about 2400 and about 2500, between about 2500 and about 2600, between about 2600 and about 2700, between about 2700 and about 2800, between about 2800 and about 2900, between about 2900 and about 3000, between about 3000 and about 3100, between about 3100 and about 3200, between about 3200 and about 3300, between about 3300 and about 3400, between about 3400 and about 3500. between about 3500 and about 3600, between about 3600 and about 3700, between about 3700 and about 3800, between about 3800 and about 3900, or between about 3900 and about 4000. In some aspects, the average number of ASO molecules per exosome is at least about 1900, at least about 2000, at least about 2100, at least about 2200, at least about 2300, at least about 2400, at least about 2500, at least about 2600, at least about 2700, at least about 2800, at least about 2900, at least about 3000, at least about 3100, at least about 3200, at least about 3300, at least about 3400, at least about 3500, at least about 3600, at least about 3700, at least about 3800, at least about 3900, or at least about 4000. In some aspects, the loading efficiency is 37% to 68%. In some aspects, the loading efficiency is between about 30% and about 75%. In some aspects, the loading efficiency is between about 30% and about 35%, between about 35% and about 40%, between about 40% and about 45%, between about 45% and about 50%, between about 50% and about 55%, between about 55% and about 60%, between about 60% and about 65%, between about 65% and about 70%, or between about 70% and about 75%. In some aspects, the loading efficiency is at least about 30%, at least about 35%, at least about 40%, at least about 45%, at least about 50%, at least about 55%, at least about 60%, at least about 65%, at least about 70%, or at least about 75%.

[0026] The present disclosure provides an exosome comprising an antisense oligonucleotide [ASO] covalently linked to the exosome via an anchoring moiety [AM] according to the formula: [AM]-L₁-[SP₁]-L₂-[SP₂]-L₃-[BAM] wherein [AM] is cholesterol-TEG; L₁ is a phosphodiesterase cleavable bond; SP₁ is C3; L₂ is a phosphorothioate non-cleavable bond; SP₂ is TEG; and, L₃ is a phosphorothioate non-cleavable bond.

[0027] In some aspects, the exosome is a native exosome. In some aspects, the average number of ASO molecules per exosome is about 4780. In some aspects, the average number of ASO molecules per exosome is between about 4500 and about 5000. In some aspects, the average number of ASO molecules per exosome is at least 4500. In some aspects, the loading efficiency is about 80%. In some aspects, n the loading efficiency is between about 70% and about 90%. In some aspects, the loading efficiency is at least about 70%. In some aspects, the exosome is an exosome overexpressing PTGFRN. In some aspects, the average number of ASO molecules per exosome is about 1659. In some aspects, the average number of ASO molecules per exosome is between about 1500 and about 2000. In some aspects, the average number of ASO molecules per exosome is at least about 1500. In some aspects, the loading efficiency is about 28%. In some aspects, the loading efficiency is between about 20% and about 35%. In some aspects, the loading efficiency is at least about 20%.

[0028] The present disclosure also provides an exosome comprising an antisense oligonucleotide [ASO] covalently linked to the exosome via an anchoring moiety [AM] according to the formula: [AM]-L₁-[SP₁]-L₂-[BAM] wherein [AM] is cholesterol-TEG; L₁ is a phosphodiesterase cleavable bond; SP₁ is TEG; and L₂ is a phosphorothioate non-cleavable bond.

[0029] In some aspects, the exosome is a native exosome. In some aspects, the average number of ASO molecules per exosome is about 4090. In some aspects, the average number of ASO molecules per exosome is between about 3500 and about 4500. In some aspects, the average number of ASO molecules per exosome is at least 3500. In some aspects, the loading efficiency is about 68%. In some aspects, the loading efficiency is at least about 60%. In some aspects, the loading efficiency is between about 60% and about 70%. In some aspects, the exosome is an exosome overexpressing PTGFRN. In some aspects, the average number of ASO molecules per exosome is about 1890. In some aspects, the average number of ASO molecules per exosome is between about 1400 and about 2400. In some aspects, the average number of ASO molecules per exosome is at least about 1400. In some aspects, the loading efficiency is about 31%. In some aspects, the loading efficiency is between about 20% and about 40%. In some aspects, the loading efficiency is at least about 20%.

### BRIEF DESCRIPTION OF THE DRAWINGS/FIGURES

[0030] FIG. 1 is a schematic view showing the general structure of an exosome (left), an exemplary biologically active molecule (e.g., an oligonucleotide) connected to a ligand that allows the attachment to the exterior surface of the exosome via a linker (center), and how the biologically active molecule (e.g., an oligonucleotide) connected to a lipid anchor (e.g., cholesterol) via a linker can be attached to the membrane of the exosome (right).

[0031] FIG. 2 is a schematic representation showing the general architecture of the constructs disclosed in the present application, comprising for example a membrane anchoring moiety (e.g., a lipid or a lipid plus a spacer), a biologically active molecule, and a linker or combination thereof. Note that the anchoring moiety may represent a complex molecule that contains hydrophobic domains.

[0032] FIG. 3 shows exemplary membrane anchor lipid blocks suitable for solid phase synthesis.

[0033] FIG. 4 shows exemplary spacer and combinations thereof that can be interspersed between an anchoring moiety (e.g., a lipid) and a biologically active molecule (e.g., an ASO). Stable or cleavable linkers can be included between each spacer. Also shown are spacer blocks suitable for solid phase synthesis.

[0034] FIG. 5 shows different constructs comprising a lipid anchor (including associated linker where commercially available anchors include linker), combinations of spacers, and an ASO where FFLuc is an ASO sequence complementary to the mRNA for the firefly luciferase protein. The loading efficiencies, the number of ASO per exosome, and group averages for number of ASO per exosome are given when the different structures were loaded on native exosomes. The amount of ASO/EV is positively correlated with potency where potency is determined to be the amount of knock-down of the expression of firefly luciferase stably expressed in a cell line.

[0035] FIG. 6 shows different constructs comprising a lipid anchor (including associated linker where commercially available anchors include linker), combinations of spacers, and an ASO where FFLuc is an ASO sequence complementary to the mRNA for the firefly luciferase protein. The loading efficiencies, the number of ASO per exosome, and group averages for number of ASO per exosome are given when the different structures were loaded on exosomes with over-expressed PTGFRN. The amount of ASO/EV is positively correlated with potency where potency is determined to be the amount of knock-down of the expression of firefly luciferase stably expressed in a cell line.

[0036] FIG. 7 show a statistical analysis of the contributions of exosome type, anchoring moiety (i.e., membrane anchor), spacer proximal to the vesicle surface (i.e., spacer 1), and spacer distal to the vesicle surface (i.e., spacer 2) to loading density (i.e. ASO/EV). In FIG. 7, native EVs and PrX EVs (over-expressing PTGFRN) were analyzed jointly. An integrated least squares model with R²≥0.91 was generated and demonstrated exosome type, membrane anchor, and spacer 1 to be statistically significant contributors (p<0.05) to loading density. This shows that the linker technology can be applied in a platform manner across select ASO sequences with contributions of linker components largely independent of ASO sequence.

[0037] FIGS. 8A and 8B show statistical models in which native EVs and PrX EVs were considered separaterly. To improve the accuracy of the statistical model, separate least squares models were generated for native exosomes (FIG. 8A; R²≥0.95) and exosomes over-expressing PTGFRN (FIG. 8B; PrX; R²≥0.97).

[0038] FIG. 8C shows the relative contributions of each structural property to the quantity of ASO molecules per exosome. The membrane anchor, tocopherol and the spacer 1, C3 provided the largest increase in loading density for both types of exosomes.

[0039] FIGS. 9A, 9B, and 9C show the potency of specific anchor-spacer constructs on luciferase knockdown in native exosomes. The constructs used in the experiments are shown in FIG. 9A. FIG. 9B shows the potency of constructs T1-T9. FIG. 9C shows the potency of constructs C1-C9 and L1-L3. Arrows is FIG. 9A highlight the structures that provided the most luciferase knockdown.

[0040] FIGS. 10A and 10B shows knock-down of the signal for luciferase protein native exosomes (FIG. 10A) or exosomes over-expressing PTGFRN (FIG. 10B) compared to the loading density achieved with the linker. Optimal linkers are defined by maximum ASO/EV loading and/or minimum normalized expression of firefly luciferase. Cholesterol and tocopherol-c8 were shown to be the best anchoring moiety for association with native exosomes and exosomes with over-expressed PTGFRN, respectively. TEG and C3 provided the largest increase in potency of the options for spacer 1.

[0041] FIG. 11 shows membrane anchors (lipids), linkers, and antisense oligonucleotides that were using to generate the Anchor-Linker-ASO constructs of Example 4. The number between parathesis after each each ASO name denotes the number of different linker structures evaluated.

[0042] FIG. 12 shows the sequences of the ASOs in the experiments presented in Example 4. FFLUC and RLUC are named after the luminescent reporter genes targeted. The MYC and STAT6 ASO are named after the genes targeted by the ASO. Nb: LNA residues (including LNA-5MeC and LNA T/LNA-5MeU). Nm: 2′-O′MOE residues (including MOE-5MeC and MOE-T/MOED-5MeU). dN: DNA residues. (5MdC): 5-Methyl-dC. S: phosphonothioate backbone modification.

[0043] FIG. 13A shows a statistical model (R2=0.86) was generated to determine the contribution of different structural parameters to loading density on the exosomes. The structural parameters considered were ASO, Spacer 1, Spacer 2, and membrane anchor.

[0044] FIG. 13B shows the number of ASO constructs per exosome for each one of the tested linker constructs compared to the exoASO-STAT6 control (Chol-TEG-HEG linker).

[0045] FIG. 13C is a schematic representation of the relative impact of each linker component on loading density.

[0046] FIGS. 14A-14E show stability plots presenting the amount of ASO associated to exosomes loaded with structures (constructs) comprising STAT6 ASO after 2, 4, or 8 days of incubation in different buffers. The structures evaluated were Cholesterol-TEG-None-STAT6 (FIG. 14A); Cholesterol-C6-C3-STAT6 (FIG. 14B); Tocopherol-C8-TEG-STAT6 (FIG. 14C); Tocopherol-TEG-HEG-STAT6 (FIG. 14D); and Palmitate-C6-HEG-STAT6 (FIG. 14E).

[0047] FIG. 15 provides a summary of stability and load density results. Stability was higher when exosomes were stored under high salt or high salt and sucrose conditions, independently of the temperature. Exosomes under high salt conditions without sucrose were more stable at high temperatures. Load density was lower under low salt conditions. ASO constructed with cholesterol or tocopherol lipid anchors had higher load densities that linkers with palmitate. Under high salt and low temperature conditions, ASO constructs having a single spacer were less stable that ASO constructs having two spacers.

[0048] FIG. 16 shows that under the salt, temperature, and sucrose conditions tested there were no changes in particle count.

[0049] FIG. 17 shows that under the salt, temperature, and sucrose conditions tested there were no changes in particle size.

[0050] FIG. 18 shows that for the exoASO-STAT6 control, the potency per exosome positively correlated with loading density.

[0051] FIG. 19A shows examples of lipid-linker-ASO structure designs with POI/PS variations. PO: phosphodiester; PSA: phosphorothioate.

[0052] FIG. 19B shows potency measured as IC50 values normalized based on ASO concentration (nM).

[0053] FIG. 19C shows potency measured as IC50 values normalized based on per exosome particle (p/mL).

[0054] FIG. 20 shows the stability of exoASO with five different linkers. % Associated ASO loss is calculated based on formula: % Associated ASO loss=([ASO]₀-[ASO]N)/[ASO]₀, where [ASO]₀ is the total associated ASO concentration at day 0, [ASO]N is the associated ASO concentration at day N.

[0055] FIG. 21 shows stability of exoASO with five different linkers as measured by particle concentration, which remained stable over 8 days at 4° C.

[0056] FIG. 22 shows stability of exoASO with five different linkers as measured by particle size, which remained stable over 8 days at 4° C.

[0057] FIG. 23A shows examples of lipid-linker-ASO structure designs with Val-Cit cleavable linker mechanism in which the ASO is a STAT6 ASO.

[0058] FIG. 23B shows the potency of the constructs presented in FIG. 23A measured as IC50 values normalized based on ASO concentration (nM).

[0059] FIG. 24 shows examples of lipid-linker-ASO design in which the ASO is an EGFP ASO.

[0060] FIG. 25 shows an exemplary lipid-linker-ASO design with a redox cleavable linker mechanism in which the ASO is a STAT6 ASO

[0061] FIG. 26 shows the potency of the construct presented in FIG. 25 measured as IC50 value normalized based on ASO concentration (nM).

[0062] FIG. 27 shows a schematic representation of the loading, purification, and characterization processes for a lipid-linker-ASO constructr, in this case, an ASO targeting EGFP.

[0063] FIG. 28 shows a schematic representation of the development of an EGFP splicing rescue assay. The 293AAV-pCB-2754 cell line was developed to evaluate the efficacy of EGFP and exoEGFP with various linkers. Point mutation at 654 results in the inability of fully transcribing the EGFP; thus, no luminescence from EGFP or Nano Luciferase is observed. With the treatment with an ASO, EGFP was rescued, and therefore, both EGFP and Nano Luciferase signal was observed. The luminescence of Nano luciferase was employed for high-throughput quantification of efficacy. The modified sequence of the EGFP ASO is also shown Nm: 2′-O′MOE residues (including MOE-5MeC and MOE-T/MOED-5MeU); s: phosphonothioate backbone modification. The base sequence of the EGFP ASO is GCTATTACCTTAACCCAG (SEQ ID NO: 1093).

[0064] FIG. 29 shows the characterization of the newly developed cell line used in the EGFP splicing rescue assay in terms of cell viability (CTG assay) and efficacy at three dose levels.

[0065] FIG. 30 shows loading density and efficacy of exoASO-EGFP with various PO and non-cleavable PEG linkers using the EGFP splicing rescue assay. “Low” and “High” is a relative, qualitative reference to the loading density achieved in a paired set of experiments, where loading density was controlled through modulation of loading temperature and ASO concentration. The legend in the lower plot delineates the dose of ASO administered to each sample in the potency assay.

### DETAILED DESCRIPTION

[0066] The present disclosure is directed to extracellular vesicles (EVs), e.g., exosomes, comprising at least one biologically active molecule covalently linked to the EV, e.g., exosome, via an optimized linker and an anchoring moiety and uses thereof. Non-limiting examples of the various aspects are shown in the present disclosure.

[0067] Before the present disclosure is described in greater detail, it is to be understood that this invention is not limited to the particular compositions or process steps described, as such can, of course, vary. As will be apparent to those of skill in the art upon reading this disclosure, each of the individual aspects described and illustrated herein has discrete components and features which can be readily separated from or combined with the features of any of the other several aspects without departing from the scope or spirit of the present invention. Any recited method can be carried out in the order of events recited or in any other order which is logically possible.

[0068] The headings provided herein are not limitations of the various aspects of the disclosure, which can be defined by reference to the specification as a whole. It is also to be understood that the terminology used herein is for the purpose of describing particular aspects only, and is not intended to be limiting, since the scope of the present disclosure will be limited only by the appended claims.

[0069] Accordingly, the terms defined immediately below are more fully defined by reference to the specification in its entirety.

### I. Definitions

[0070] In order that the present description can be more readily understood, certain terms are first defined. Additional definitions are set forth throughout the detailed description.

[0071] It is to be noted that the term “a” or “an” entity refers to one or more of that entity; for example, “a nucleotide sequence,” is understood to represent one or more nucleotide sequences. As such, the terms “a” (or “an”), “one or more,” and “at least one” can be used interchangeably herein. It is further noted that the claims can be drafted to exclude any optional element. As such, this statement is intended to serve as antecedent basis for use of such exclusive terminology as “solely,” “only” and the like in connection with the recitation of claim elements, or use of a negative limitation.

[0072] Furthermore, “and/or” where used herein is to be taken as specific disclosure of each of the two specified features or components with or without the other. Thus, the term “and/or” as used in a phrase such as “A and/or B” herein is intended to include “A and B,” “A or B,” “A” (alone), and “B” (alone). Likewise, the term “and/or” as used in a phrase such as “A, B, and/or C” is intended to encompass each of the following aspects: A, B, and C; A, B, or C; A or C; A or B; B or C; A and C; A and B; B and C; A (alone); B (alone); and C (alone).

[0073] It is understood that wherever aspects are described herein with the language “comprising,” otherwise analogous aspects described in terms of “consisting of” and/or “consisting essentially of” are also provided.

[0074] Unless defined otherwise, all technical and scientific terms used herein have the same meaning as commonly understood by one of ordinary skill in the art to which this disclosure is related. For example, the Concise Dictionary of Biomedicine and Molecular Biology, Juo, Pei-Show, 2nd ed., 2002, CRC Press; The Dictionary of Cell and Molecular Biology, 3rd ed., 1999, Academic Press; and the Oxford Dictionary of Biochemistry and Molecular Biology, Revised, 2000, Oxford University Press, provide one of skill with a general dictionary of many of the terms used in this disclosure.

[0075] Units, prefixes, and symbols are denoted in their Système International de Unites (SI) accepted form. Numeric ranges are inclusive of the numbers defining the range. Where a range of values is recited, it is to be understood that each intervening integer value, and each fraction thereof, between the recited upper and lower limits of that range is also specifically disclosed, along with each subrange between such values. The upper and lower limits of any range can independently be included in or excluded from the range, and each range where either, neither or both limits are included is also encompassed within the disclosure. Thus, ranges recited herein are understood to be shorthand for all of the values within the range, inclusive of the recited endpoints. For example, a range of 1 to 10 is understood to include any number, combination of numbers, or sub-range from the group consisting of 1, 2, 3, 4, 5, 6, 7, 8, 9, and 10.

[0076] Where a value is explicitly recited, it is to be understood that values which are about the same quantity or amount as the recited value are also within the scope of the disclosure. Where a combination is disclosed, each subcombination of the elements of that combination is also specifically disclosed and is within the scope of the disclosure. Conversely, where different elements or groups of elements are individually disclosed, combinations thereof are also disclosed. Where any element of a disclosure is disclosed as having a plurality of alternatives, examples of that disclosure in which each alternative is excluded singly or in any combination with the other alternatives are also hereby disclosed; more than one element of a disclosure can have such exclusions, and all combinations of elements having such exclusions are hereby disclosed.

[0077] Nucleotides are referred to by their commonly accepted single-letter codes. Unless otherwise indicated, nucleotide sequences are written left to right in 5′ to 3′ orientation. Nucleotides are referred to herein by their commonly known one-letter symbols recommended by the IUPAC-IUB Biochemical Nomenclature Commission. Accordingly, A represents adenine, C represents cytosine, G represents guanine, T represents thymine, U represents uracil.

[0078] Amino acid sequences are written left to right in amino to carboxy orientation. Amino acids are referred to herein by either their commonly known three letter symbols or by the one-letter symbols recommended by the IUPAC-IUB Biochemical Nomenclature Commission.

[0079] The term “about” is used herein to mean approximately, roughly, around, or in the regions of. When the term “about” is used in conjunction with a numerical range, it modifies that range by extending the boundaries above and below the numerical values set forth. In general, the term “about” can modify a numerical value above and below the stated value by a variance of, e.g., 10 percent, up or down (higher or lower).

[0080] The terms “administration,” “administering,” and grammatical variants thereof refer to introducing a composition, such as an EV (e.g., exosome) of the present disclosure, into a subject via a pharmaceutically acceptable route. The introduction of a composition, such as an EV (e.g., exosome) of the present disclosure, into a subject is by any suitable route, including intratumorally, orally, pulmonarily, intranasally, parenterally (intravenously, intra-arterially, intramuscularly, intraperitoneally, or subcutaneously), rectally, intralymphatically, intrathecally, periocularly or topically. Administration includes self-administration and the administration by another. A suitable route of administration allows the composition or the agent to perform its intended function. For example, if a suitable route is intravenous, the composition is administered by introducing the composition or agent into a vein of the subject.

[0081] As used herein, the term “agonist” refers to a molecule that binds to a receptor and activates the receptor to produce a biological response. Receptors can be activated by either an endogenous or an exogenous agonist. Non-limiting examples of endogenous agonist include hormones, neurotransmitters, and cyclic dinucleotides. Non-limiting examples of exogenous agonist include drugs, small molecules, and cyclic dinucleotides. The agonist can be a full, partial, or inverse agonist.

[0082] The term “amino acid substitution” refers to replacing an amino acid residue present in a parent or reference sequence (e.g., a wild type sequence) with another amino acid residue. An amino acid can be substituted in a parent or reference sequence (e.g., a wild type polypeptide sequence), for example, via chemical peptide synthesis or through recombinant methods known in the art. Accordingly, a reference to a “substitution at position X” refers to the substitution of an amino acid present at position X with an alternative amino acid residue. In some aspects, substitution patterns can be described according to the schema AnY, wherein A is the single letter code corresponding to the amino acid naturally or originally present at position n, and Y is the substituting amino acid residue. In other aspects, substitution patterns can be described according to the schema An(YZ), wherein A is the single letter code corresponding to the amino acid residue substituting the amino acid naturally or originally present at position n, and Y and Z are alternative substituting amino acid residues that can replace A.

[0083] As used herein, the term “antagonist” refers to a molecule that blocks or dampens an agonist mediated response rather than provoking a biological response itself upon bind to a receptor. Many antagonists achieve their potency by competing with endogenous ligands or substrates at structurally defined binding sites on the receptors. Non-limiting examples of antagonists include alpha blockers, beta-blocker, and calcium channel blockers. The antagonist can be a competitive, non-competitive, or uncompetitive antagonist.

[0084] As used herein, the term “antibody” encompasses an immunoglobulin whether natural or partly or wholly synthetically produced, and fragments thereof. The term also covers any protein having a binding domain that is homologous to an immunoglobulin binding domain. “Antibody” further includes a polypeptide comprising a framework region from an immunoglobulin gene or fragments thereof that specifically binds and recognizes an antigen. Use of the term antibody is meant to include whole antibodies, polyclonal, monoclonal and recombinant antibodies, fragments thereof, and further includes single-chain antibodies, humanized antibodies, murine antibodies, chimeric, mouse-human, mouse-primate, primate-human monoclonal antibodies, anti-idiotype antibodies, antibody fragments, such as, e.g., scFv, (scFv)₂, Fab, Fab′, and F(ab′)₂, F(ab1)₂, Fv, dAb, and Fd fragments, diabodies, and antibody-related polypeptides. Antibody includes bispecific antibodies and multispecific antibodies so long as they exhibit the desired biological activity or function. In some aspects of the present disclosure, the biologically active molecule is an antibody or a molecule comprising an antigen binding fragment thereof.

[0085] The terms “antibody-drug conjugate” and “ADC” are used interchangeably and refer to an antibody linked, e.g., covalently, to a therapeutic agent (sometimes referred to herein as agent, drug, or active pharmaceutical ingredient) or agents. In some aspects of the present disclosure, the biologically active molecule is an antibody-drug conjugate.

[0086] As used herein, the term “approximately,” as applied to one or more values of interest, refers to a value that is similar to a stated reference value. In certain aspects, the term “approximately” refers to a range of values that fall within 10%, 9%, 8%, 7%, 6%, 5%, 4%, 3%, 2%, 1%, or less in either direction (greater than or less than) of the stated reference value unless otherwise stated or otherwise evident from the context (except where such number would exceed 100% of a possible value).

[0087] The term “aryl” refers to a carbocyclic aromatic group. Examples of aryl groups include, but are not limited to, phenyl, naphthyl and anthracenyl. A carbocyclic aromatic group can be unsubstituted or substituted with one or more groups including, but not limited to, —C₁₋₈ alkyl, —O—(C₁₋₈ alkyl), -aryl, —C(O)R′, —OC(O)R′, —C(O)OR′, —C(O)NH₂, —C(O)NHR′, —C(O)N(R′)₂—, —NHC(O)R′, —S(O)₂R′, —S(O)R′, —OH, -halogen, —N₃, —NH₂, —NH(R′), —N(R′)₂ and —CN, wherein each R′ is independently H, —C₁₋₈ alkyl, or aryl.

[0088] The term “arylene” refers to an aryl group which has two covalent bonds and can be in the ortho, meta, or para configurations as shown in the following structures:

[chemical structure]

[0089] in which the phenyl group can be unsubstituted or substituted with up to four groups including, but not limited to, —C₁₋₈ alkyl, —O—(C₁₋₈ alkyl), -aryl, —C(O)R′, —OC(O)R′, —C(O)OR′, —C(O)NH₂, —C(O)NHR′, —C(O)N(R′)₂—, —NHC(O)R′, —S(O)₂R′, —S(O)R′, —OH, -halogen, —N₃, —NH₂, —NH(R′), —N(R′)₂ and —CN, wherein each R′ is independently H, —C₁₋₈ alkyl, or aryl.

[0090] The term “biologically active molecule” as use herein refers to any molecule that can be attached to an EV, e.g., exosome, via an anchoring moiety, wherein the molecule can have a therapeutic or prophylactic effect in a subject in need thereof, or be used for diagnostic purposes. Accordingly, by way of example, the term biologically active molecule includes proteins (e.g., antibodies, proteins, polypeptides, and derivatives, fragments, and variants thereof), lipids and derivatives thereof, carbohydrates (e.g., glycan portions in glycoproteins), or small molecules. In some aspects, the biologically active molecule is a radioisotope. In some aspects, the biologically active molecule is a detectable moiety, e.g., a radionuclide, a fluorescent molecule, or a contrast agent. In some aspects, the biologically active molecule can be or can comprise a targeting moiety or a tropism moiety. In some aspects, the biologically active molecule can be or can comprise, for example, an affinity ligand such as biotin. In some aspects, the biologically active molecule can be or can comprise a moiety capable to improve a pharmacokinetic or pharmacodynamic property, for example, a moiety capable in increase plasma half-life, e.g., a PEG moiety.

[0091] The term “C₁₋₈ alkyl” as used herein refers to a straight chain or branched, saturated hydrocarbon having from 1 to 8 carbon atoms. Representative “C₁₋₈ alkyl” groups include, but are not limited to, methyl, ethyl, n-propyl, n-butyl, n-pentyl, n-hexyl, n-heptyl, n-octyl, isopropyl, sec-butyl, isobutyl, tert-butyl, isopentyl, and 2-methylbutyl.

[0092] The term “C₁₋₁₀ alkylene” refers to a saturated, straight chain hydrocarbon group of the formula —(CH₂)₁₋₁₀—. Examples of C₁₋₁₀ alkylene include methylene, ethylene, propylene, butylene, pentylene, hexylene, heptylene, octylene, nonylene, and decalene.

[0093] The term “C₃₋₈ carbocycle” refers to a 3-, 4-, 5-, 6-, 7- or 8-membered saturated or unsaturated non-aromatic carbocyclic ring. Representative C₃₋₈ carbocycles include, but are not limited to, cyclopropyl, cyclobutyl, cyclopentyl, cyclopentadienyl, cyclohexyl, cyclohexenyl, 1,3-cyclohexadienyl, 1,4-cyclohexadienyl, cycloheptyl, 1,3-cycloheptadienyl, 1,3,5-cycloheptatrienyl, cyclooctyl, and -cyclooctadienyl. A C₃₋₈ carbocycle group can be unsubstituted or substituted with one or more groups including, but not limited to, —C₁₋₈ alkyl, —O—(C₁₋₈ alkyl), aryl, —C(O)R′, —OC(O)R′, —C(O)OR′, —C(O)NH₂, —C(O)NHR′, —C(O)N(R′)₂—, NHC(O)R′, —S(O)₂R′, —S(O)R′, —OH, -halogen, —N₃, —NH₂, —NH(R′), —N(R′)₂ and —CN, where each R′ is independently H, —C₁₋₈ alkyl, or aryl.

[0094] The term “C₃₋₈ carbocyclo” refers to a C₃₋₈ carbocycle group defined above wherein one or more of the carbocycle's hydrogen atoms is replaced with a bond.

[0095] The term “C₃₋₈ heterocycle” refers to an aromatic or non-aromatic C₃₋₈ carbocycle in which one to four of the ring carbon atoms are independently replaced with a heteroatom selected from the group consisting of O, S and N. Representative examples of a C₃₋₈ heterocycle include, but are not limited to, benzofuranyl, benzothiophene, indolyl, benzopyrazolyl, coumarinyl, isoquinolinyl, pyrrolyl, thiophenyl, furanyl, thiazolyl, imidazolyl, pyrazolyl, triazolyl, quinolinyl, pyrimidinyl, pyridinyl, pyridonyl, pyrazinyl, pyridazinyl, isothiazolyl, isoxazolyl and tetrazolyl. A C₃₋₈ heterocycle can be unsubstituted or substituted with up to seven groups including, but not limited to, —C₁₋₈ alkyl, —O—(C₁₋₈ alkyl), -aryl, —C(O)R′, —OC(O)R′, —C(O)OR′, —C(O)NH₂, —C(O)NHR′, —C(O)N(R′)₂, —NHC(O)R′, —S(O)₂R′, —S(O)R′, —OH, -halogen, —N₃, —NH₂, —NH(R′), —N(R′)₂, and —CN, wherein each R′ is independently H, —C₁₋₈ alkyl, or aryl.

[0096] The term “C₃₋₈ heterocyclo” refers to a C₃₋₈ heterocycle group defined above wherein one of the heterocycle group's hydrogen atoms is replaced with a bond. A C₃₋₈ heterocyclo can be unsubstituted or substituted with up to six groups including, but not limited to, —C₁₋₈ alkyl, —O—(C₁₋₈ alkyl), -aryl, —C(O)R′, —OC(O)R′, —C(O)OR′, —C(O)NH₂, —C(O)NHR′, —C(O)N(R′)₂, —NHC(O)R′, —S(O)₂R′, —S(O)R′, —OH, -halogen, —N₃, —NH₂, —NH(R′), —N(R′)₂ and —CN, wherein each R′ is independently H, —C₁₋₈ alkyl, or aryl.

[0097] A “conservative amino acid substitution” is one in which the amino acid residue is replaced with an amino acid residue having a similar side chain. Families of amino acid residues having similar side chains have been defined in the art, including basic side chains (e.g., lysine, arginine, histidine), acidic side chains (e.g., aspartic acid, glutamic acid), uncharged polar side chains (e.g., glycine, asparagine, glutamine, serine, threonine, tyrosine, cysteine), nonpolar side chains (e.g., alanine, valine, leucine, isoleucine, proline, phenylalanine, methionine, tryptophan), beta-branched side chains (e.g., threonine, valine, isoleucine) and aromatic side chains (e.g., tyrosine, phenylalanine, tryptophan, histidine). Thus, if an amino acid in a polypeptide is replaced with another amino acid from the same side chain family, the substitution is considered to be conservative. In another aspect, a string of amino acids can be conservatively replaced with a structurally similar string that differs in order and/or composition of side chain family members.

[0098] As used herein, the term “conserved” refers to nucleotides or amino acid residues of a polynucleotide sequence or polypeptide sequence, respectively, that are those that occur unaltered in the same position of two or more sequences being compared. Nucleotides or amino acids that are relatively conserved are those that are conserved amongst more related sequences than nucleotides or amino acids appearing elsewhere in the sequences.

[0099] In some aspects, two or more sequences are said to be “completely conserved” or “identical” if they are 100% identical to one another. In some aspects, two or more sequences are said to be “highly conserved” if they are at least 70% identical, at least 80% identical, at least 90% identical, or at least 95% identical to one another. In some aspects, two or more sequences are said to be “highly conserved” if they are about 70% identical, about 80% identical, about 90% identical, about 95%, about 98%, or about 99% identical to one another. In some aspects, two or more sequences are said to be “conserved” if they are at least 30% identical, at least 40% identical, at least 50% identical, at least 60% identical, at least 70% identical, at least 80% identical, at least 90% identical, or at least 95% identical to one another. In some aspects, two or more sequences are said to be “conserved” if they are about 30% identical, about 40% identical, about 50% identical, about 60% identical, about 70% identical, about 80% identical, about 90% identical, about 95% identical, about 98% identical, or about 99% identical to one another. Conservation of sequence may apply to the entire length of a polynucleotide or polypeptide or may apply to a portion, region or feature thereof.

[0100] As used herein, the term “conventional EV protein” means a protein previously known to be enriched in EVs.

[0101] As used herein, the term “conventional exosome protein” means a protein previously known to be enriched in exosomes, including but is not limited to CD9, CD63, CD81, PDGFR, GPI anchor proteins, lactadherin LAMP2, and LAMP2B, a fragment thereof, or a peptide that binds thereto.

[0102] The term “derivative” as used herein refers to an EV, e.g., exosome, component (e.g., a protein, such as Scaffold X, a lipid, or a carbohydrate) or to a biologically active molecule (e.g., a polypeptide, polynucleotide, lipid, carbohydrate, antibody or fragment thereof, PROTAC, etc.) that has been chemically modified to either introduce a reactive moiety (e.g., a phosphoramidite moiety).

[0103] The terms “excipient” and “carrier” are used interchangeably and refer to an inert substance added to a pharmaceutical composition to further facilitate administration of a compound.

[0104] As used herein, the terms “extracellular vesicle,” “EV,” and grammatical variants thereof, are used interchangeably and refer to a cell-derived vesicle comprising a membrane that encloses an internal space. Extracellular vesicles comprise all membrane-bound vesicles (e.g., exosomes, nanovesicles) that have a smaller diameter than the cell from which they are derived. In some aspects, extracellular vesicles range in diameter from 20 nm to 1000 nm, and can comprise various macromolecular payload either within the internal space (i.e., lumen), displayed on the external surface of the extracellular vesicle, and/or spanning the membrane. In some aspects, the payload can comprise nucleic acids, proteins, carbohydrates, lipids, small molecules, and/or combinations thereof. In certain aspects, an extracellular vehicle comprises a scaffold moiety. By way of example and without limitation, extracellular vesicles include apoptotic bodies, fragments of cells, vesicles derived from cells by direct or indirect manipulation (e.g., by serial extrusion or treatment with alkaline solutions), vesiculated organelles, and vesicles produced by living cells (e.g., by direct plasma membrane budding or fusion of the late endosome with the plasma membrane). Extracellular vesicles can be derived from a living or dead organism, explanted tissues or organs, prokaryotic or eukaryotic cells, and/or cultured cells. In some aspects, the extracellular vesicles are produced by cells that express one or more transgene products.

[0105] As used herein, the term “exosome” refers to an extracellular vesicle with a diameter between 20-300 nm (e.g., between 40-200 nm). Exosomes comprise a membrane that encloses an internal space (i.e., lumen), and, in some aspects, can be generated from a cell (e.g., producer cell) by direct plasma membrane budding or by fusion of the late endosome with the plasma membrane. In certain aspects, an exosome comprises a scaffold moiety. As described infra, exosome can be derived from a producer cell, and isolated from the producer cell based on its size, density, biochemical parameters, or a combination thereof. In some aspects, the exosomes of the present disclosure are produced by cells that express one or more transgene products.

[0106] In some aspects, EVs, e.g., exosomes, e.g., nanovesicles, of the present disclosure are engineered by covalently linking at least one biologically active molecule (e.g., a protein such as an antibody or ADC, a RNA or DNA such as an antisense oligonucleotide, a small molecule drug, a toxin) to the EV, e.g., exosome, e.g., nanovesicle, via an anchoring moiety.

[0107] In some aspects, the EVs, e.g., exosomes or nanovesicles, of the present disclosure can comprise various macromolecular payloads either within the internal space (i.e., lumen), displayed on the external (exterior) surface or internal (luminal) surface of the EV, and/or spanning the membrane. In some aspects, the payload can comprise, e.g., nucleic acids, proteins, carbohydrates, lipids, small molecules, and/or combinations thereof. In certain aspects, an EV, e.g, an exosome, comprises a scaffold moiety (e.g., Scaffold X). EVs, e.g., exosomes, can be derived from a living or dead organism, explanted tissues or organs, prokaryotic or eukaryotic cells, and/or cultured cells. In some aspects, the EVs, e.g., exosomes, are produced by cells that express one or more transgene products. In other aspects, the EVs of the present disclosure are without limitation nanovesicles, microsomes, microvesicles, extracellular bodies, or apoptotic bodies.

[0108] A schematic view of the general structure of an exosome, an exemplary biologically active molecule (e.g., an oligonucleotide) connected to a ligand that allows the attachment to the exterior surface of the exosome via a linker, and how the biologically active molecule (e.g., an oligonucleotide) connected to a lipid anchor (e.g., cholesterol) via a linker can be attached to the membrane of the exosome, are shown in FIG. 1.

[0109] As used herein, the term “fragment” of a protein (e.g., a biologically active molecule such as a therapeutic protein, or a scaffold protein such as Scaffold X) refers to an amino acid sequence of a protein that is shorter than the naturally-occurring sequence, N- and/or C-terminally deleted or any part of the protein deleted in comparison to the naturally occurring protein.

[0110] As used herein, the term “functional fragment” refers to a protein fragment that retains protein function. Accordingly, in some aspects, a functional fragment of a Scaffold protein, e.g., Scaffold X protein, retains the ability to anchor a biologically active molecule on the luminal surface or on the external surface of the EV, e.g., exosome.

[0111] Whether a fragment is a functional fragment can be assessed by any art known methods to determine the protein content of EVs, e.g., exosomes, including Western Blots, FACS analysis and fusions of the fragments with autofluorescent proteins like, e.g., GFP. In certain aspects, a functional fragment of a Scaffold X protein retains, e.g., at least about 50%, at least about 60%, at least about 70%, at least about 80%, at least about 90% or at least about 100% of the ability of the naturally occurring Scaffold X protein to anchor a biologically active molecule on the luminal or on the external surface of the EV, e.g., exosome.

[0112] As used herein “anchoring” a biologically active molecule on the luminal or external surface of an EV (e.g., exosome) of the present disclosure via a scaffold protein refers to attaching covalently or non-covalently the biologically active molecule to the portion of the scaffold molecule located on the luminal or external surface of the EV (e.g., exosome), respectively.

[0113] As used herein, the term “homology” refers to the overall relatedness between polymeric molecules, e.g. between nucleic acid molecules (e.g. DNA molecules and/or RNA molecules) and/or between polypeptide molecules. Generally, the term “homology” implies an evolutionary relationship between two molecules. Thus, two molecules that are homologous will have a common evolutionary ancestor. In the context of the present disclosure, the term homology encompasses both to identity and similarity.

[0114] In some aspects, polymeric molecules are considered to be “homologous” to one another if at least 25%, 30%, 35%, 40%, 45%, 50%, 55%, 60%, 65%, 70%, 75%, 80%, 85%, 90%, 95%, or 99% of the monomers in the molecule are identical (exactly the same monomer) or are similar (conservative substitutions). The term “homologous” necessarily refers to a comparison between at least two sequences (polynucleotide or polypeptide sequences).

[0115] In the context of the present disclosure, substitutions (even when they are referred to as amino acid substitution) are conducted at the nucleic acid level, i.e., substituting an amino acid residue with an alternative amino acid residue is conducted by substituting the codon encoding the first amino acid with a codon encoding the second amino acid.

[0116] As used herein, the term “identity” refers to the overall monomer conservation between polymeric molecules, e.g., between polypeptide molecules or polynucleotide molecules (e.g. DNA molecules and/or RNA molecules). The term “identical” without any additional qualifiers, e.g., protein A is identical to protein B, implies the sequences are 100% identical (100% sequence identity). Describing two sequences as, e.g., “70% identical,” is equivalent to describing them as having, e.g., “70% sequence identity.”

[0117] Calculation of the percent identity of two polypeptide sequences, for example, can be performed by aligning the two sequences for optimal comparison purposes (e.g., gaps can be introduced in one or both of a first and a second polypeptide sequences for optimal alignment and non-identical sequences can be disregarded for comparison purposes). In certain aspects, the length of a sequence aligned for comparison purposes is at least 30%, at least 40%, at least 50%, at least 60%, at least 70%, at least 80%, at least 90%, at least 95%, or 100% of the length of the reference sequence. The amino acids at corresponding amino acid positions are then compared.

[0118] When a position in the first sequence is occupied by the same amino acid as the corresponding position in the second sequence, then the molecules are identical at that position. The percent identity between the two sequences is a function of the number of identical positions shared by the sequences, taking into account the number of gaps, and the length of each gap, which needs to be introduced for optimal alignment of the two sequences. The comparison of sequences and determination of percent identity between two sequences can be accomplished using a mathematical algorithm.

[0119] Suitable software programs are available from various sources, and for alignment of both protein and nucleotide sequences. One suitable program to determine percent sequence identity is bl2seq, part of the BLAST suite of program available from the U.S. government's National Center for Biotechnology Information BLAST web site (blast.ncbi.nlm.nih.gov). Bl2seq performs a comparison between two sequences using either the BLASTN or BLASTP algorithm. BLASTN is used to compare nucleic acid sequences, while BLASTP is used to compare amino acid sequences. Other suitable programs are, e.g., Needle, Stretcher, Water, or Matcher, part of the EMBOSS suite of bioinformatics programs and also available from the European Bioinformatics Institute (EBI) at www.ebi.ac.uk/Tools/psa.

[0120] Sequence alignments can be conducted using methods known in the art such as MAFFT, Clustal (ClustalW, Clustal X or Clustal Omega), MUSCLE, etc.

[0121] Different regions within a single polynucleotide or polypeptide target sequence that aligns with a polynucleotide or polypeptide reference sequence can each have their own percent sequence identity. It is noted that the percent sequence identity value is rounded to the nearest tenth. For example, 80.11, 80.12, 80.13, and 80.14 are rounded down to 80.1, while 80.15, 80.16, 80.17, 80.18, and 80.19 are rounded up to 80.2. It also is noted that the length value will always be an integer.

[0122] In certain aspects, the percentage identity (% ID) or of a first amino acid sequence (or nucleic acid sequence) to a second amino acid sequence (or nucleic acid sequence) is calculated as % ID=100×(Y/Z), where Y is the number of amino acid residues (or nucleobases) scored as identical matches in the alignment of the first and second sequences (as aligned by visual inspection or a particular sequence alignment program) and Z is the total number of residues in the second sequence. If the length of a first sequence is longer than the second sequence, the percent identity of the first sequence to the second sequence will be higher than the percent identity of the second sequence to the first sequence.

[0123] One skilled in the art will appreciate that the generation of a sequence alignment for the calculation of a percent sequence identity is not limited to binary sequence-sequence comparisons exclusively driven by primary sequence data. It will also be appreciated that sequence alignments can be generated by integrating sequence data with data from heterogeneous sources such as structural data (e.g., crystallographic protein structures), functional data (e.g., location of mutations), or phylogenetic data. A suitable program that integrates heterogeneous data to generate a multiple sequence alignment is T-Coffee, available at www.tcoffee.org, and alternatively available, e.g., from the EBI. It will also be appreciated that the final alignment used to calculate percent sequence identity can be curated either automatically or manually.

[0124] As used herein, the terms “isolated,” “purified,” “extracted,” and grammatical variants thereof are used interchangeably and refer to the state of a preparation of desired EVs (e.g., a plurality of EVs of known or unknown amount and/or concentration), that has undergone one or more processes of purification, e.g., a selection or an enrichment of the desired EV, e.g., exosome, preparation. In some aspects, isolating or purifying as used herein is the process of removing, partially removing (e.g., a fraction) of the EVs, e.g., exosomes, from a sample containing producer cells. In some aspects, an isolated EV, e.g., exosome, composition has no detectable undesired activity or, alternatively, the level or amount of the undesired activity is at or below an acceptable level or amount. In other aspects, an isolated EV, e.g., exosome, composition has an amount and/or concentration of desired EVs, e.g., exosomes, at or above an acceptable amount and/or concentration. In other aspects, the isolated EVs, e.g., exosome, composition is enriched as compared to the starting material (e.g., producer cell preparations) from which the composition is obtained. This enrichment can be by at least about 10%, at least about 20%, at least about 30%, at least about 40%, at least about 50%, at least about 60%, at least about 70%, at least about 80%, at least about 90%, at least about 95%, at least about 96%, at least about 97%, at least about 98%, at least about 99%, at least about 99.9%, at least about 99.99%, at least about 99.999%, at least about 99.9999%, or greater than 99.9999% as compared to the starting material. In some aspects, isolated EV, e.g. exosome, preparations are substantially free of residual biological products. In some aspects, the isolated EV, e.g., exosome, preparations are 100% free, at least about 99% free, at least about 98% free, at least about 97% free, at least about 96% free, at least about 95% free, at least about 94% free, at least about 93% free, at least about 92% free, at least about 91% free, or at least about 90% free of any contaminating biological matter. Residual biological products can include abiotic materials (including chemicals) or unwanted nucleic acids, proteins, lipids, or metabolites. Substantially free of residual biological products can also mean that the EV, e.g., exosome, composition contains no detectable producer cells and that only EVs, e.g., exosomes, are detectable.

[0125] The terms “linked,” “fused,” and grammatical variants thereof are used interchangeably and refer to a first moiety, e.g., a first amino acid sequence or nucleotide sequence, covalently or non-covalently joined to a second moiety, e.g., a second amino acid sequence, nucleotide sequence, and/or a lipid (e.g., cholesterol), respectively. The first moiety can be directly joined or juxtaposed to the second moiety or alternatively an intervening moiety can covalently join the first moiety to the second moiety. The term “linked” means not only a fusion of a first moiety to a second moiety at the C-terminus or the N-terminus, but also includes insertion of the whole first moiety (or the second moiety) into any two points, e.g., amino acids, in the second moiety (or the first moiety, respectively). In one aspect, the first moiety is linked to a second moiety by a peptide bond or a linker. The first moiety can be linked to a second moiety by a phosphodiester bond or a linker. The linker can be a peptide or a polypeptide (for polypeptide chains) or a nucleotide or a nucleotide chain (for nucleotide chains) or any chemical moiety (for polypeptide or polynucleotide chains or any chemical molecules). The term “linked” is also indicated by a hyphen (-). In some aspects, a Scaffold X protein on an EV, e.g., exosome, can be linked or fused to a biologically active molecule via a linker, spacer, or combination thereof.

[0126] The term “modified,” when used in the context of EVs, e.g., exosomes, described herein, refers to an alteration or engineering of an EV, e.g., exosome and/or its producer cell, such that the modified EV, e.g., exosome, is different from a naturally-occurring EV, e.g., exosome. In some aspects, a modified EV, e.g., exosome, described herein comprises a membrane that differs in composition of a protein, a lipid, a small molecular, a carbohydrate, etc. compared to the membrane of a naturally-occurring EV, e.g., exosome. E.g., the membrane comprises higher density or number of natural EV, e.g., exosome, proteins and/or membrane comprises proteins that are not naturally found in EV, e.g., exosomes. In certain aspects, such modifications to the membrane change the exterior surface of the EV, e.g., exosome (e.g., surface-engineered EVs and exosomes described herein).

[0127] As used herein the terms “modified protein” or “protein modification” refers to a protein having at least 15% identity to the non-mutant amino acid sequence of the protein. A modification of a protein includes a fragment or a variant of the protein. A modification of a protein can further include chemical, or physical modification to a fragment or a variant of the protein.

[0128] As used herein, the terms “modulate,” “modify,” and grammatical variants thereof, generally refer when applied to a specific concentration, level, expression, function or behavior, to the ability to alter, by increasing or decreasing, e.g., directly or indirectly promoting/stimulating/up-regulating or interfering with/inhibiting/down-regulating the specific concentration, level, expression, function or behavior, such as, e.g., to act as an antagonist or agonist. In some instances, a modulator can increase and/or decrease a certain concentration, level, activity or function relative to a control, or relative to the average level of activity that would generally be expected or relative to a control level of activity.

[0129] As used herein, the term “nanovesicle” refers to an extracellular vesicle with a diameter between 20-250 nm (e.g., between 30-150 nm) and is generated from a cell (e.g., producer cell) by direct or indirect manipulation such that the nanovesicle would not be produced by the cell without the manipulation. Appropriate manipulations of the cell to produce the nanovesicles include but are not limited to serial extrusion, treatment with alkaline solutions, sonication, or combinations thereof. In some aspects, production of nanovesicles can result in the destruction of the producer cell. In some aspects, population of nanovesicles described herein are substantially free of vesicles that are derived from cells by way of direct budding from the plasma membrane or fusion of the late endosome with the plasma membrane. In certain aspects, a nanovesicle comprises a scaffold moiety, e.g., Scaffold X. Nanovesicles, once derived from a producer cell, can be isolated from the producer cell based on its size, density, biochemical parameters, or a combination thereof.

[0130] As used herein, the term “payload” refers to a biologically active molecule (e.g., a therapeutic agent) that acts on a target (e.g., a target cell) that is contacted with the EV, e.g., exosome, of the present disclosure. Non-limiting examples of payloads that can be introduced into an EV, e.g., exosome, include therapeutic agents such as, nucleotides (e.g., nucleotides comprising a detectable moiety or a toxin or that disrupt transcription), nucleic acids (e.g., DNA or mRNA molecules that encode a polypeptide such as an enzyme, or RNA molecules that have regulatory function such as miRNA, dsDNA, lncRNA, and siRNA), amino acids (e.g., amino acids comprising a detectable moiety or a toxin or that disrupt translation), polypeptides (e.g., enzymes), lipids, carbohydrates, and small molecules (e.g., small molecule drugs and toxins). In certain aspects, a payload comprises an antigen. As used herein, the term “antigen” refers to any agent that when introduced into a subject elicits an immune response (cellular or humoral) to itself. In some aspects, the payload molecules are covalently linked to the EV, e.g., exosome, via linker, spacer, or combination thereof disclosed herein. In other aspects, a payload comprises an adjuvant.

[0131] The terms “pharmaceutically-acceptable carrier,” “pharmaceutically-acceptable excipient,” and grammatical variations thereof, encompass any of the agents approved by a regulatory agency of the U.S. Federal government or listed in the U.S. Pharmacopeia for use in animals, including humans, as well as any carrier or diluent that does not cause the production of undesirable physiological effects to a degree that prohibits administration of the composition to a subject and does not abrogate the biological activity and properties of the administered compound. Included are excipients and carriers that are useful in preparing a pharmaceutical composition and are generally safe, non-toxic, and desirable.

[0132] As used herein, the term “pharmaceutical composition” refers to one or more of the compounds described herein, such as, e.g., an EV, such as exosome of the present disclosure, mixed or intermingled with, or suspended in one or more other chemical components, such as pharmaceutically-acceptable carriers and excipients. One purpose of a pharmaceutical composition is to facilitate administration of preparations of EVs, e.g., exosomes, to a subject.

[0133] The term “polynucleotide” as used herein refers to polymers of nucleotides of any length, including ribonucleotides, deoxyribonucleotides, analogs thereof, or mixtures thereof. This term refers to the primary structure of the molecule. Thus, the term includes triple-, double- and single-stranded deoxyribonucleic acid (“DNA”), as well as triple-, double- and single-stranded ribonucleic acid (“RNA”). It also includes modified, for example by alkylation, and/or by capping, and unmodified forms of the polynucleotide. More particularly, the term “polynucleotide” includes polydeoxyribonucleotides (containing 2-deoxy-D-ribose), polyribonucleotides (containing D-ribose), including tRNA, IRNA, hRNA, siRNA and mRNA, whether spliced or unspliced, any other type of polynucleotide which is an N- or C-glycoside of a purine or pyrimidine base, and other polymers containing normucleotidic backbones, for example, polyamide (e.g., peptide nucleic acids “PNAs”) and polymorpholino polymers, and other synthetic sequence-specific nucleic acid polymers providing that the polymers contain nucleobases in a configuration which allows for base pairing and base stacking, such as is found in DNA and RNA. In some aspects of the present disclosure, the biologically active molecule attached to the EV, e.g., exosome, via a linker, spacer, or combination thereof disclosed herein is a polynucleotide, e.g., an antisense oligonucleotide. In particular aspects, the polynucleotide comprises an mRNA. In other aspect, the mRNA is a synthetic mRNA. In some aspects, the synthetic mRNA comprises at least one unnatural nucleobase. In some aspects, all nucleobases of a certain class have been replaced with unnatural nucleobases (e.g., all uridines in a polynucleotide disclosed herein can be replaced with an unnatural nucleobase, e.g., 5-methoxyuridine). In some aspects of the present disclosure, the biologically active molecule is a polynucleotide (e.g., an antisense oligonucleotide, ASO).

[0134] The terms “polypeptide,” “peptide,” and “protein” are used interchangeably herein to refer to polymers of amino acids of any length. The polymer can comprise modified amino acids. The terms also encompass an amino acid polymer that has been modified naturally or by intervention; for example, disulfide bond formation, glycosylation, lipidation, acetylation, phosphorylation, or any other manipulation or modification, such as conjugation with a labeling component. Also included within the definition are, for example, polypeptides containing one or more analogs of an amino acid (including, for example, unnatural amino acids such as homocysteine, ornithine, p-acetylphenylalanine, D-amino acids, and creatine), as well as other modifications known in the art. In some aspects of the present disclosure, the biologically active molecule attached to the EV, e.g., exosome, via a linker, spacer, or combination thereof disclosed herein is a polypeptide, e.g., an antibody or a derivative thereof such as an ADC, a PROTAC, a toxin, a fusion protein, or an enzyme.

[0135] The term “polypeptide,” as used herein, refers to proteins, polypeptides, and peptides of any size, structure, or function. Polypeptides include gene products, naturally occurring polypeptides, synthetic polypeptides, homologs, orthologs, paralogs, fragments and other equivalents, variants, and analogs of the foregoing. A polypeptide can be a single polypeptide or can be a multi-molecular complex such as a dimer, trimer or tetramer. They can also comprise single chain or multichain polypeptides. Most commonly disulfide linkages are found in multichain polypeptides. The term polypeptide can also apply to amino acid polymers in which one or more amino acid residues are an artificial chemical analogue of a corresponding naturally occurring amino acid. In some aspects, a “peptide” can be less than or equal to 50 amino acids long, e.g., about 5, 10, 15, 20, 25, 30, 35, 40, 45, or 50 amino acids long.

[0136] The terms “prevent,” “preventing,” and variants thereof as used herein, refer partially or completely delaying onset of an disease, disorder and/or condition; partially or completely delaying onset of one or more symptoms, features, or clinical manifestations of a particular disease, disorder, and/or condition; partially or completely delaying onset of one or more symptoms, features, or manifestations of a particular disease, disorder, and/or condition; partially or completely delaying progression from a particular disease, disorder and/or condition; and/or decreasing the risk of developing pathology associated with the disease, disorder, and/or condition. In some aspects, preventing an outcome is achieved through prophylactic treatment.

[0137] As used herein, the term “producer cell” refers to a cell used for generating an EV, e.g., exosome. A producer cell can be a cell cultured in vitro, or a cell in vivo. A producer cell includes, but not limited to, a cell known to be effective in generating EVs, e.g., exosomes, e.g., HEK293 cells, Chinese hamster ovary (CHO) cells, mesenchymal stem cells (MSCs), BJ human foreskin fibroblast cells, fHDF fibroblast cells, AGE.HN® neuronal precursor cells, CAPR amniocyte cells, adipose mesenchymal stem cells, RPTEC/TERTI cells. In certain aspects, a producer cell is not an antigen-presenting cell. In some aspects, a producer cell is not a dendritic cell, a B cell, a mast cell, a macrophage, a neutrophil, Kupffer-Browicz cell, cell derived from any of these cells, or any combination thereof.

[0138] As used herein, “prophylactic” refers to a therapeutic or course of action used to prevent the onset of a disease or condition, or to prevent or delay a symptom associated with a disease or condition.

[0139] As used herein, a “prophylaxis” refers to a measure taken to maintain health and prevent or delay the onset of a bleeding episode, or to prevent or delay symptoms associated with a disease or condition.

[0140] A “recombinant” polypeptide or protein refers to a polypeptide or protein produced via recombinant DNA technology. Recombinantly produced polypeptides and proteins expressed in engineered host cells are considered isolated for the purpose of the disclosure, as are native or recombinant polypeptides which have been separated, fractionated, or partially or substantially purified by any suitable technique. The polypeptides disclosed herein can be recombinantly produced using methods known in the art. Alternatively, the proteins and peptides disclosed herein can be chemically synthesized. In some aspects of the present disclosure, the Scaffold X proteins present in EVs, e.g., exosomes, are recombinantly produced by overexpressing the scaffold proteins in the producer cells, so that levels of scaffold proteins in the resulting EVs, e.g., exosomes are significantly increased with respect to the levels of scaffold proteins present in EVs, e.g., exosomes, of producer cells not overexpressing such scaffold proteins.

[0141] As used herein, the term “scaffold moiety” refers to a molecule, e.g., a protein such as Scaffold X, that can be used to anchor a payload, e.g., a biologically active molecule, to the EV, e.g., exosome, e.g., on the external surface of the EV, e.g., exosome. In certain aspects, a scaffold moiety comprises a synthetic molecule. In some aspects, a scaffold moiety comprises a non-polypeptide moiety. In other aspects, a scaffold moiety comprises, e.g., a lipid, carbohydrate, protein, or combination thereof (e.g., a glycoprotein or a proteolipid) that naturally exists in the EV, e.g., exosome. In some aspects, a scaffold moiety comprises a lipid, carbohydrate, or protein that does not naturally exist in the EV, e.g., exosome. In some aspects, a scaffold moiety comprises a lipid or carbohydrate which naturally exists in the EV, e.g., exosome, but has been enriched in the EV, e.g., exosome with respect to basal/native/wild type levels. In some aspects, a scaffold moiety comprises a protein which naturally exists in the EV, e.g., exosome but has been enriched in the EV, e.g., exosome, for example, by recombinant overexpression in the producer cell, with respect to basal/native/wild type levels. In certain aspects, a scaffold moiety is Scaffold X.

[0142] As used herein, the term “Scaffold X” refers to EV, e.g., exosome, proteins that have been identified on the surface of EVs, e.g., exosomes. See, e.g., U.S. Pat. No. 10,195,290, which is incorporated herein by reference in its entirety. Non-limiting examples of Scaffold X proteins include: prostaglandin F2 receptor negative regulator (“PTGFRN”); basigin (“BSG”); immunoglobulin superfamily member 2 (“IGSF2”); immunoglobulin superfamily member 3 (“IGSF3”); immunoglobulin superfamily member 8 (“IGSF8”); integrin beta-1 (“ITGB1”); integrin alpha-4 (“ITGA4”); 4F2 cell-surface antigen heavy chain (“SLC3A2”); and a class of ATP transporter proteins (“ATPIA1,” “ATPIA2,” “ATPIA3,” “ATPIA4,” “ATPIB3,” “ATP2B1,” “ATP2B2,” “ATP2B3,” “ATP2B”). In some aspects, a Scaffold X protein can be a whole protein or a fragment thereof (e.g., functional fragment, e.g., the smallest fragment that is capable of anchoring another moiety on the external surface or on the luminal surface of the EV, e.g., exosome). In some aspects, a Scaffold X can anchor a biologically active molecule to the external surface or the lumen of the EV, e.g. an exosome. In some aspects of the present disclosure, a biologically active molecule can be covalently attached to a Scaffold X, e.g., via a linker, spacer, or combination thereof disclosed herein. Non-limiting examples of other scaffold moieties that can be used with the present disclosure include: aminopeptidase N (CD13); Neprilysin, AKA membrane metalloendopeptidase (MME); ectonucleotide pyrophosphatase/phosphodiesterase family member 1 (ENPP1); Neuropilin-1 (NRP1); CD9, CD63, CD81, PDGFR, GPI anchor proteins, lactadherin, LAMP2, and LAMP2B.

[0143] As used herein, the term “similarity” refers to the overall relatedness between polymeric molecules, e.g. between polynucleotide molecules (e.g. DNA molecules and/or RNA molecules) and/or between polypeptide molecules. Calculation of percent similarity of polymeric molecules to one another can be performed in the same manner as a calculation of percent identity, except that calculation of percent similarity takes into account conservative substitutions as is understood in the art. It is understood that percentage of similarity is contingent on the comparison scale used, i.e., whether the amino acids are compared, e.g., according to their evolutionary proximity, charge, volume, flexibility, polarity, hydrophobicity, aromaticity, isoelectric point, antigenicity, or combinations thereof.

[0144] Unless otherwise indicated, reference to a compound that has one or more stereocenters intends each stereoisomer, and all combinations of stereoisomers, thereof.

[0145] The terms “subject,” “patient,” “individual,” and “host,” and variants thereof are used interchangeably herein and refer to any mammalian subject, including without limitation, humans, domestic animals (e.g., dogs, cats and the like), farm animals (e.g., cows, sheep, pigs, horses and the like), and laboratory animals (e.g., monkey, rats, mice, rabbits, guinea pigs and the like) for whom diagnosis, treatment, or therapy is desired, particularly humans. The methods described herein are applicable to both human therapy and veterinary applications.

[0146] As used herein, the term “substantially free” means that the sample comprising EVs, e.g., exosomes, comprises less than 10% of macromolecules, e.g., contaminants, by mass/volume (m/v) percentage concentration. Some fractions may contain less than 0.001%, less than 0.01%, less than 0.05%, less than 0.1%, less than 0.2%, less than 0.3%, less than 0.4%, less than 0.5%, less than 0.6%, less than 0.7%, less than 0.8%, less than 0.9%, less than 1%, less than 2%, less than 3%, less than 4%, less than 5%, less than 6%, less than 7%, less than 8%, less than 9%, or less than 10% (m/v) of macromolecules.

[0147] As used herein the term “surface-engineered EV” (e.g., Scaffold X-engineered exosome) refers to an EV with the membrane or the surface of the EV modified in its composition so that the surface of the engineered EV is different from that of the EV prior to the modification or of the naturally occurring EV.

[0148] As used herein the term “surface-engineered exosome” (e.g., Scaffold X-engineered exosome) refers to an exosome with the membrane or the surface of the exosome (external surface or luminal surface) modified in its composition so that the surface of the engineered exosome is different from that of the exosome prior to the modification or of the naturally occurring exosome.

[0149] The engineering can be on the surface of the EV, e.g., exosome or in the membrane of the EV, e.g., exosome, so that the surface of the EV, e.g., exosome is changed. For example, the membrane can be modified in its composition of, e.g., a protein, a lipid, a small molecule, a carbohydrate, or a combination thereof. The composition can be changed by a chemical, a physical, or a biological method or by being produced from a cell previously or concurrently modified by a chemical, a physical, or a biological method. Specifically, the composition can be changed by a genetic engineering or by being produced from a cell previously modified by genetic engineering. In some aspects, a surface-engineered EV, e.g., exosome, comprises an exogenous protein (i.e., a protein that the EV, e.g., exosome, does not naturally express) or a fragment or variant thereof that can be exposed to the surface of the EV, e.g., exosome or can be an anchoring point (attachment) for a moiety exposed on the surface of the EV, e.g., exosome. In other aspects, a surface-engineered EV, e.g., exosome comprises a higher expression (e.g., higher number) of a natural EV, e.g., exosome protein (e.g., Scaffold X) or a fragment or variant thereof that can be exposed to the surface of the EV, e.g., exosome or can be an anchoring point (attachment) for a moiety exposed on the surface of the EV, e.g., exosome. In a specific aspect, a surface-engineered EV, e.g., exosome, comprises the modification of one or more membrane components, e.g., a protein such as Scaffold X, a lipid, a small molecule, a carbohydrate, or a combination thereof, wherein at least one of the components is covalently attached to a biologically active molecule via a linker, spacer, or combination thereof disclosed herein.

[0150] As used herein the term “therapeutically effective amount” is the amount of reagent or pharmaceutical compound comprising an EV or exosome of the present disclosure that is sufficient to a produce a desired therapeutic effect, pharmacologic and/or physiologic effect on a subject in need thereof. A therapeutically effective amount can be a “prophylactically effective amount” as prophylaxis can be considered therapy.

[0151] The terms “treat,” “treatment,” or “treating,” as used herein refers to, e.g., the reduction in severity of a disease or condition; the reduction in the duration of a disease course; the amelioration or elimination of one or more symptoms associated with a disease or condition; the provision of beneficial effects to a subject with a disease or condition, without necessarily curing the disease or condition. The term also includes prophylaxis or prevention of a disease or condition or its symptoms thereof. In one aspect, the term “treating” or “treatment” means inducing an immune response in a subject against an antigen.

[0152] As used herein, the term “variant” of a molecule (e.g., functional molecule, antigen, or Scaffold X) refers to a molecule that shares certain structural and functional identities with another molecule upon comparison by a method known in the art. For example, a variant of a protein can include a substitution, insertion, deletion, frame shift or rearrangement in another protein.

[0153] In some aspects, a variant of a Scaffold X or derivative comprises a Scaffold X variant having at least about 70% identity to the full-length, mature PTGFRN, BSG, IGSF2, IGSF3, IGSF8, ITGB1, ITGA4, SLC3A2, or ATP transporter proteins or a fragment (e.g., functional fragment) of the PTGFRN, BSG, IGSF2, IGSF3, IGSF8, ITGB1, ITGA4, SLC3A2, or ATP transporter proteins.

[0154] In some aspects, the variant or variant of a fragment of Scaffold X protein disclosed herein, or derivatives thereof, retains the ability to be specifically targeted to EVs, e.g., exosomes. In some aspects, the Scaffold X or Scaffold X derivative includes one or more mutations, for example, conservative amino acid substitutions.

[0155] Naturally occurring variants are called “allelic variants,” and refer to one of several alternate forms of a gene occupying a given locus on a chromosome of an organism (Genes II, Lewin, B., ed., John Wiley & Sons, New York (1985)). These allelic variants can vary at either the polynucleotide and/or polypeptide level and are included in the present disclosure. Alternatively, non-naturally occurring variants can be produced by mutagenesis techniques or by direct synthesis.

[0156] Using known methods of protein engineering and recombinant DNA technology, variants can be generated to improve or alter the characteristics of the polypeptides. For instance, one or more amino acids can be deleted from the N-terminus or C-terminus of the secreted protein without substantial loss of biological function. Ron et al., J. Biol. Chem. 268: 2984-2988 (1993), incorporated herein by reference in its entirety, reported variant KGF proteins having heparin binding activity even after deleting 3, 8, or 27 amino-terminal amino acid residues. Similarly, interferon gamma exhibited up to ten times higher activity after deleting 8-10 amino acid residues from the carboxy terminus of this protein. (Dobeli et al., J. Biotechnology 7:199-216 (1988), incorporated herein by reference in its entirety.)

[0157] Moreover, ample evidence demonstrates that variants often retain a biological activity similar to that of the naturally occurring protein. For example, Gayle and coworkers (J. Biol. Chem 268:22105-22111 (1993), incorporated herein by reference in its entirety) conducted extensive mutational analysis of human cytokine IL-1a. They used random mutagenesis to generate over 3,500 individual IL-1a mutants that averaged 2.5 amino acid changes per variant over the entire length of the molecule. Multiple mutations were examined at every possible amino acid position. The investigators found that “[m]ost of the molecule could be altered with little effect on either [binding or biological activity].” (See Abstract.) In fact, only 23 unique amino acid sequences, out of more than 3,500 nucleotide sequences examined, produced a protein that significantly differed in activity from wild-type.

[0158] As stated above, variants or derivatives include, e.g., modified polypeptides. In some aspects, variants or derivatives of, e.g., polypeptides, polynucleotides, lipids, glycoproteins, are the result of chemical modification and/or endogenous modification. In some aspects, variants or derivatives are the result of in vivo modification. In some aspects, variants or derivatives are the result of in vitro modification. In yet other aspects, variant or derivatives are the result of intracellular modification in producer cells.

[0159] Modifications present in variants and derivatives include, e.g., acetylation, acylation, ADP-ribosylation, amidation, covalent attachment of flavin, covalent attachment of a heme moiety, covalent attachment of a nucleotide or nucleotide derivative, covalent attachment of a lipid or lipid derivative, covalent attachment of phosphotidylinositol, cross-linking, cyclization, disulfide bond formation, demethylation, formation of covalent cross-links, formation of cysteine, formation of pyroglutamate, formylation, gamma-carboxylation, glycosylation, GPI anchor formation, hydroxylation, iodination, methylation, myristoylation, oxidation, pegylation (Mei et al., Blood 116:270-79 (2010), which is incorporated herein by reference in its entirety), proteolytic processing, phosphorylation, prenylation, racemization, selenoylation, sulfation, transfer-RNA mediated addition of amino acids to proteins such as arginylation, and ubiquitination.

[0160] In some aspects, Scaffold X can be modified at any convenient location. In some aspects, a biologically active molecule can be modified at any convenient location. In particular aspects of the present disclosure, an EV, e.g., exosome, component (e.g., a protein such as Scaffold X, a lipid, or a glycan) and/or a biologically active molecule (e.g., an antibody or ADC, a PROTAC, a small molecule such as a cyclic dinucleotide, a toxin such as MMAE, a STING agonist, a tolerizing agent, or an antisense oligonucleotide) can be modified to yield a derivative comprising at least one linker, spacer, or combination thereof disclosed herein.

### II. EVs (e.g., Exosomes) Comprising Optimized Linkers

[0161] Extracellular vesicles (EVs) typically have 20 nm to 1000 nm in diameter; e.g., exosomes, which are small extracellular vesicles, have typically 100-200 nm in diameter. EVs, e.g., exosomes, are composed of a limiting lipid bilayer and a diverse set of proteins and nucleic acids (Maas, S. L. N., et al., Trends. Cell Biol. 27(3): 172-188 (2017)). EVs, e.g., exosomes, exhibit preferential uptake in discrete cell types and tissues, and their tropism can be directed by adding proteins to their surface that interact with receptors on the surface of target cells (Alvarez-Erviti, L., et al., Nat. Biotechnol. 29(4):341-345 (2011)).

[0162] Unlike antibodies, EVs (e.g., exosomes) can accommodate large numbers of molecules attached to their surface, on the order of thousands to tens of thousands of molecules per EV (e.g., exosome). EV (e.g., exosome)-drug conjugates thus represent a platform to deliver a high concentration of therapeutic compounds to discrete cell types, while at the same time limiting overall systemic exposure to the compound, which in turn reduces off-target toxicity. The accommodation of larger numbers of molecules on the surface of EVs (e.g., exosomes) can be influenced, for example, by the type of biologically active molecule used (e.g., an antibody is bulkier than an antisense oligonucleotide), the type of membrane anchor used (e.g., a protein anchor is bulkier than a lipid or lipid plus spacer anchor), and the combinations of linkers and spacers connecting the biologically active molecule and the membrane anchor. In this respect, the present disclosure provides specific combinations of linkers and spacers connecting a biologically active molecule (e.g., an ASO) and a membrane anchor (e.g., a lipid), wherein the membrane anchor attaches the biologically active molecule to the surface of an EV (e.g., exosome).

[0163] In some aspects, the present disclosure provides a “biologically active molecule” (BAM), e.g., an ASO, attached, e.g., covalently, to one or more anchoring moieties (AM) either directly or indirectly, e.g., via one or more linker combinations. The anchoring moiety can insert into the lipid bilayer of an EV, e.g., an exosome, allowing the loading of the exosome with a BAM, e.g., an ASO. Currently, a predominant obstacle to the commercialization of exosomes as a delivery vehicle for polar BAMs, e.g., ASOs, is highly inefficient loading. As shown herein, this obstacle can be overcome by using specific linkers/spacer combinations (i.e., “optimized linkers”) connecting the BAM to the AM prior to loading them into EVs, e.g., exosomes. Thus, as described herein, the use of optimized linkers facilitates the loading of BAMs, e.g., ASOs, onto EVs, e.g., exosomes.

[0164] The composition and methods of loading EVs (e.g., exosomes) with constructs comprising BAMs, e.g., ASOs, connected to AMs (e.g., lipids such as sterols) via optimized linkers set forth herein significantly improve loading efficiency and BAM density as compared to the loading efficiency and BAM density previously reported for introducing unmodified BAMs into EVs (e.g., exosomes) by, for example, electroporation or cationic lipid transfection. The compositions and methods disclosed herein also significantly improve the potency of EVs (e.g., exosomes) compared to the potencies previously reported when unmodified BAMs are introduced into EVs (e.g., exosomes) by, for example, electroporation or cationic lipid transfection.

[0165] A schematic representation showing the general architecture of the constructs disclosed in the present application, comprising for example a membrane anchoring moiety (e.g., a lipids or a lipid plus a spacer), a biologically active molecule, and a linker or combination thereof is shown in FIG. 2.

[0166] Examplary key building blocks for linkers of the present disclosure, e.g., membrane anchores (lipids), spacers and combinations thereof, as well as the compounds used for their chemical synthesis (e.g., phosphoramidites) are shown in FIGS. 3 and 4. Specific building blocks are also presented in FIG. 11. Exemplary constructs are shown, for example, in FIG. 5, FIG. 6, and FIG. 9A,

[0167] The present disclosure provides an extracellular vesicle (EV) comprising a biologically active molecule (BAM) covalently linked to the EV via an anchoring moiety (AM) according to the formula:

[AM]-L₁-[SP₁]-L₂-[SP₂]-L₃-[BAM] (Formula 1)
[0168] wherein:
[0169] [AM] is the anchoring moiety;
[0170] L₁ is a cleavable or non-cleavable linkage,
[0171] L₂ and L₃ are optional cleavable or non-cleavable linkages;
[0172] SP₁ is an optional first spacer; and,
[0173] SP₂ is an optional second spacer.

[0174] As used herein the term “optimized linker” refers to a combination of structural elements comprising, e.g., “linkages” and “spacers” which connect an anchoring moiety [AM] and a biological active molecule [BAM]. These optimized linkers of the present disclosure allow loading biological active molecules (e.g., ASOs) more efficiently and in larger numbers onto the surface of EVs (e.g., exosome), than corresponding construct comprising the same anchoring moiety [AM] and biologically active molecule [BAM] in the absence of an optimized linker of the present disclosure. In other words, the constructs disclosed herein, e.g., a construct of Formula 1 [AM]-L₁-[SP₁]-L₂-[SP₂]-L₃-[BAM], results in (i) higher EV loading efficiency, (ii) higher number of [BAM] per EV, (iii) higher density of [BAM] per EV, (iv) higher [BAM] potency, or (v) any combination therein, with respect to a construct with the architecture [AM]-L₁-[BAM].

[0175] As used herein, the term “linkage” refers to any stable bond or chemical group connecting, e.g., an anchoring moiety [AM] and a spacer [SP], a spacer [SP] and a biologically active molecule [BAM], or an anchoring moiety [AM] and a biologically active molecule [BAM]. In constructs where more than an anchoring moiety [AM] or biologically active molecule [BAM] is present, a linkage can connect two anchoring moieties or two biologically active moieties. In some aspects, a “linkage” can be a bond, for example a phosphodiester (cleavable) or phosphorothioate (non-cleavable) bond. In other aspects, a “linkage” can comprise a linker, for example, cleavable or non-cleavable linkers. In some aspects, a linkage can comprise multiple linkers and bonds, which can respond to different stimuli such as pH, temperature, enzymes, etc.

[0176] The term “spacer” as used herein refers to a chemical moiety which is capable of covalently linking together two spaced moieties (e.g., a biologically active molecule) into a normally stable dipartate molecule. Generally, spacers as not cleavable. For example, a spacer can be an alkyl chain, or a polymeric chain formed by example by glycol or glycerol units.

[0177] In some aspects, the “optimized linkers” of the present disclosure prevent the aggregation of biological moieties on the surface of the EV (e.g., exosome). In some aspects, the length of the optimized linker connecting an anchoring moiety [AM] and a biologically active molecule [BAM] is between about 2 nm and about 30 nm.

[0178] In some aspects, the length of the optimized linker is about 2 nm, about 3 nm, about 4 nm, about 5 nm, about 6 nm, about 7 nm, about 8 nm, about 9 nm, about 10 nm, about 11 nm, about 12 nm, about 13 nm, about 14 nm, about 15 nm, about 16 nm, about 17 nm, about 18 nm, about 19 nm, about 20 nm, about 21 nm, about 22 nm, about 23 nm, about 24 nm, about 25 nm, about 26 nm, about 27 nm, about 28 nm, about 29 nm, or about 30 nm. In some aspects, the length of the optimized linker is at least about 2 nm, at least about 3 nm, at least about 4 nm, at least about 5 nm, at least about 6 nm, at least about 7 nm, at least about 8 nm, at least about 9 nm, at least about 10 nm, at least about 11 nm, at least about 12 nm, at least about 13 nm, at least about 14 nm, at least about 15 nm, at least about 16 nm, at least about 17 nm, at least about 18 nm, at least about 19 nm, at least about 20 nm, at least about 21 nm, at least about 22 nm, at least about 23 nm, at least about 24 nm, at least about 25 nm, at least about 26 nm, at least about 27 nm, at least about 28 nm, at least about 29 nm, or at least about 30 nm. In some aspects, the length of the optimized linker is less than about 2 nm, less than about 3 nm, less than about 4 nm, less than about 5 nm, less than about 6 nm, less than about 7 nm, less than about 8 nm, less than about 9 nm, less than about 10 nm, less than about 11 nm, less than about 12 nm, less than about 13 nm, less than about 14 nm, less than about 15 nm, less than about 16 nm, less than about 17 nm, less than about 18 nm, less than about 19 nm, less than about 20 nm, less than about 21 nm, less than about 22 nm, less than about 23 nm, less than about 24 nm, less than about 25 nm, less than about 26 nm, less than about 27 nm, less than about 28 nm, less than about 29 nm, or less than about 30 nm.

[0179] In some aspects, the length of the optimized linker is about 2 nm to about 4 nm, about 3 nm to about 5 nm, about 4 nm to about 6 nm, about 5 nm to about 7 nm, about 6 nm to about 8 nm, about 7 nm to about 9 nm, about 8 nm to about 10 nm, about 9 nm to about 11 nm, about 10 nm to about 12 nm, about 11 nm to about 13 nm, about 12 nm to about 14 nm, about 13 nm to about 15 nm, about 14 nm to about 16 nm, about 15 nm to about 17 nm, about 16 nm to about 18 nm, about 17 nm to about 19 nm, about 18 nm to about 20 nm, about 19 nm to about 21 nm, about 20 nm to about 22 nm, about 21 nm to about 23 nm, about 22 nm to about 24 nm, about 23 nm to about 25 nm, about 24 nm to about 26 nm, about 25 nm to about 27 nm, about 26 nm to about 28 nm, about 27 nm to about 29 nm, about 28 nm to about 30 nm, about 2 nm to about 6 nm, about 4 nm to about 8 nm, about 6 nm to about 10 nm, about 8 nm to about 12 nm, about 10 nm to about 14 nm, about 12 nm to about 16 nm, about 14 nm to about 18 nm, about 16 nm to about 20 nm to about, about 18 nm to about 22 nm, about 20 nm to about 24 nm, about 22 nm to about 26 nm, about 24 nm to about 28 nm, about 26 nm to about 30 nm, about 2 nm to about 10 nm, about 4 nm to about 12 nm, about 6 nm to about 14 nm, about 8 nm to about 16 nm, about 10 nm to about 18 nm, about 12 nm to about 20 nm, about 14 nm to about 22 nm, about 16 nm to about 24 nm, about 18 nm to about 26 nm, about 20 nm to about 28 nm, about 22 nm to about 30 nm, about 2 nm to about 12 nm, about 4 nm to about 14 nm, about 6 nm to about 16 nm, about 8 nm to about 18 nm, about 10 nm to about 20 nm, about 12 nm to about 22 nm, about 14 nm to about 24 nm, about 16 nm to about 26 nm, about 18 nm to about 28 nm, about 20 nm to about 30 nm, about 2 nm to about 5 nm, about 5 nm to about 10 nm, about 10 nm to about 15 nm, about 15 nm to about 20 nm, about 20 nm to about 25 nm, or about 25 nm to about 30 nm.

[0180] In some aspects, the anchoring moiety [AM] comprises a sterol, a lipid (e.g., a phospholipid), a vitamin, a peptide, or a combination thereof and optionally a linker or spacer. In general, the AM can comprise any hydrophobic moiety or combination thereof capable of inserting into the lipid bilayer of the EV (e.g., exosome), interacting electrostatically with the surface of the EV (e.g., exosome), or a combination thereof.

[0181] In some aspects, the anchoring moiety [AM] can comprise, e.g., a hydrophobic moiety (e.g., a lipid such as a sterol) and a spacer, wherein the spacer is an alkyl spacer, generally a linear alkyl spacer. In some aspects, the alkyl spacer attached to the hydrophobic moiety is selected from the group consisting of C1, C2, C3, C4, C5, C6, C7, C8, C9, C10, C11, C12, C13, C14 or C15, wherein C denotes a methyl unit (carbon unit) and the numeral indicates the number of methyl units (carbon units) in the alkyl spacer. In some aspects, the alkyl spacer comprises a single carbon unit (C1). In some aspects, the alkyl spacer is C2. In some aspects, the alkyl spacer is C3. In some aspects, the alkyl spacer is C4. In some aspects, the alkyl spacer is C5. In some aspects, the alkyl spacer is C6. In some aspects, the alkyl spacer is C7. In some aspects, the alkyl spacer is C8. In some aspects, the alkyl spacer is C9. In some aspects, the alkyl spacer is C10. In some aspects, the alkyl spacer is C11. In some aspects, the alkyl spacer is C12. In some aspects, the alkyl spacer is C13. In some aspects, the alkyl spacer is C14. In some aspects, the alkyl spacer is C15. In some aspects, the spacer attached to the sterol, a lipid, a vitamin, or peptide in the anchoring moiety [AM] is any molecule or combination thereof with a length equivalent to that of a C1, C2, C3, C4, C5, C6, C7, C8, C9, C10, C11, C12, C13, C14, or C15 linear alkyl spacer.

[0182] In some aspects, the anchoring moiety [AM] can comprise, e.g., a hydrophobic moiety (e.g., a lipid such as a sterol) and a spacer, wherein the spacer is a glycol spacer. In some aspects, the glycol spacer is selected from the group consisting of diethylene glycol, triethylene glycol, tetraethylene glycol (TEG), pentaethylene glycol, hexaethylene glycol (HEG), heptaethylene glycol, octaethylene glycol, nonaethylene glycol, or decaethylene glycol. In some aspects, the glycol spacer can comprise 11, 12, 13, 14 or 15 glycol units. In some aspects, the glycol spacer is HEG. In some aspects, the glycol spacer is TEG. In some aspects, the spacer attached to the sterol, a lipid, a vitamin, or peptide in the anchoring moiety [AM] is any molecule or combination thereof with a length equivalent to that of a diethylene glycol, triethylene glycol, tetraethylene glycol (TEG), pentaethylene glycol, hexaethylene glycol (HEG), heptaethylene glycol, octaethylene glycol, nonaethylene glycol, or decaethylene glycol linker. In some aspects, the spacer attached to the sterol, a lipid, a vitamin, or peptide in the anchoring moiety [AM] is any molecule or combination thereof with a length equivalent to that of a glycol spacer with 11, 12, 13, 14, or 15 glycol units.

[0183] In some aspects, the anchoring moiety [AM] comprises a stero, e.g., a sterol is selected from the group consisting of cholesterol, ergosterol, 7-dehydrocholesterol, 24S-hydroxycholesterol, lanosterol, cycloartenol, fucosterol, saringosterol, campesterol, β-sitosterol, sitostanol, coprostanol, avenasterol, stigmasterol, or combinations thereof. In some specific aspects, the anchoring moiety [AM] comprises cholesterol.

[0184] In some aspects, the anchoring moiety [AM] comprises, consists, or consists essentially of a fatty acid, e.g., a straight chain fatty acid. In some aspects, the anchoring moiety [AM] comprises, consists, or consists essentially of a straight chain fatty, a branched fatty acid, an unsaturated fatty acid, a monounsaturated fatty acid, polyunsaturated fatty acid, a hydroxyl fatty acid, a polycarboxylic acid, or any combination thereof. For example, in some aspects, the straight chain fatty comprises, consists, or consists essentially of butyric acid, caproic acid, caprylic acid, capric acid, lauric acid, myristic acid, palmitic acid, stearic acid, or a combination thereof. In some specific aspects, the straight chain fatty acid is palmitic acid.

[0185] In some aspects, the anchoring moiety [AM] comprises, consists, or consists essentially of a phospholipid, e.g., a lecithin, a phosphatidyl choline, a phosphoinositol, a phosphosphingolipid, a phosphoethanolamine, a phosphatidic acid, or any combination thereof.

[0186] In some aspects, the anchoring moiety [AM] comprises, consists, or consists essentially of a vitamin, e.g., vitamin E (tocopherol or tocotrienol), vitamin D (e.g., vitamin D2 or ergocalciferol, vitamin D3 or cholecalciferol, or a combination thereof), vitamin K, riboflavin, niacin, pyridoxine, or a combination thereof.

[0187] In the context of the present disclosure, a combination of lipid moieties, e.g., different fatty acids, different sterols, different vitamins, or combinations thereof, in an anchoring moiety [AM] means that some of the constructs disclosed herein, e.g., constructs of Formula 1, in a population of constructs can have different lipid moieties. For example, for the same biologically molecule [BAM], some of the constructs of Formula 1 may have different anchoring moieties [AM], e.g., some may comprise a fatty acid, whereas other may comprise a vitamin or a sterol. Selecting combinations of constructs with different lipids moieties generally results in better packing on the lipids in the membrane on the EV (e.g., an exosome), which can result in higher loading efficiency and BAM density.

[0188] In some aspects, the anchoring moiety [AM] comprises a vitamin. In some aspects, the anchoring moiety [AM] consists of a vitamin. In some aspects, the anchoring moiety [AM] comprises a vitamin and an alkyl spacer. In some aspects, the anchoring moiety [AM] consists of a vitamin and an alkyl spacer. In some aspects, the anchoring moiety [AM] comprises tocopherol and an alkyl spacer. In some aspects, the anchoring moiety [AM] consists of tocopherol and an alkyl spacer. In some aspects, the anchoring moiety [AM] comprises a vitamin and an octyl (C8) alkyl spacer. In some aspects, the anchoring moiety [AM] consists of a vitamin and an octyl (C8) alkyl spacer. In some aspects, the anchoring moiety [AM] comprises tocopherol and an octyl (C8) alkyl spacer. In some aspects, the anchoring moiety [AM] consists of tocopherol and an octyl (C8) alkyl spacer. In some aspects, the anchoring moiety [AM] comprises tocopherol. In some aspects, the anchoring moiety [AM] consists of tocopherol.

[0189] In some aspects, the anchoring moiety [AM] comprises a fatty acid and an alkyl spacer. In some aspects, the anchoring moiety [AM] consists of a fatty acid and an alkyl spacer. In some aspects, the anchoring moiety [AM] comprises a palmitate and an alkyl spacer. In some aspects, the anchoring moiety [AM] consists of palmitate and an alkyl spacer. In some aspects, the anchoring moiety [AM] comprises a fatty acid and a hexyl (C6) alkyl spacer. In some aspects, the anchoring moiety [AM] consists of a fatty acid and a hexyl (C6) alkyl spacer. In some aspects, the anchoring moiety [AM] comprises palmitate and a hexyl (C6) alkyl spacer. In some aspects, the anchoring moiety [AM] consists of palmitate and a hexyl (C6) alkyl spacer.

[0190] In some aspects, the anchoring moiety [AM] comprises a sterol and a glycol spacer. In some aspects, the anchoring moiety [AM] consists of a sterol and a glycol spacer. In some aspects, the anchoring moiety [AM] comprises cholesterol and a glycol spacer. In some aspects, the anchoring moiety [AM] consists of cholesterol and a glycol spacer. In some aspects, the anchoring moiety [AM] comprises a sterol and a TEG glycol spacer. In some aspects, the anchoring moiety [AM] consists of a sterol and a TEG glycol spacer. In some aspects, the anchoring moiety [AM] comprises cholesterol and a TEG glycol spacer. In some aspects, the anchoring moiety [AM] consists of cholesterol and a TEG glycol spacer. In some aspects, the anchoring moiety [AM] comprises a sterol and an alkyl spacer. In some aspects, the anchoring moiety [AM] consists of a sterol and an alkyl spacer. In some aspects, the anchoring moiety [AM] comprises a sterol and a hexyl (C6) alkyl spacer. In some aspects, the anchoring moiety [AM] consists of a sterol and a hexyl (C6) alkyl spacer. In some aspects, the anchoring moiety [AM] comprises cholesterol and an alkyl spacer. In some aspects, the anchoring moiety [AM] consists of cholesterol and an alkyl spacer. In some aspects, the anchoring moiety [AM] comprises cholesterol and a hexyl (C6) alkyl spacer. In some aspects, the anchoring moiety [AM] consists of cholesterol and a hexyl (C6) alkyl spacer.

[0191] In some aspects, L₁ is a cleavable linkage comprising a phosphodiester bond. In some aspects, L₁ is a non-cleavable linkage comprising a phosphorothioate bond. In some aspects, L₂ is an optional cleavable linkage comprising a phosphodiester bond. In some aspects, L₂ is an optional non-cleavable linkage comprising a phosphorothioate bond. In some aspects, L₃ is an optional cleavable linkage comprising a phosphodiester bond. In some aspects, L₃ is an optional non-cleavable linkage comprising a phosphorothioate bond.

[0192] In some aspects, L₁ is a phosphodiester bond. In some aspects, L₁ is a phosphorothioate bond. In some aspects, L₂ is a phosphodiester bond. In some aspects, L₂ is a phosphorothioate bond. In some aspects, L₃ is a phosphodiester bond. In some aspects, L₃ is a phosphorothioate bond.

[0193] In some aspects, each of L₁, L₂, or L₃ independently comprises a phosphodiester or phosphorothioate bond, and one or more cleavable or non-cleavable linkers or spacers disclosed herein.

[0194] In some aspects, the SP₁ optional first spacer and/or the SP₂ optional second spacer independently comprise a spacer (e.g., an alkyl spacer or a glycol spacer), or a combination thereof. In some aspects, the SP₁ optional first spacer comprises or consists of an alkyl spacer which is C1, C2, C3, C4, C5, C6, C7, C8, C9, C10, C11, C12, C13, C14, or C15. In some aspects, SP₁ is a C3 or C6 alkyl spacer. In some aspects, the SP₂ optional first spacer comprises or consists of an alkyl spacer which is C1, C2, C3, C4, C5, C6, C7, C8, C9, C10, C11, C12, C13, C14, or C15. In some aspects, SP₂ is a C3 or C6 alkyl spacer.

[0195] In some aspects, the SP₁ optional first spacer comprises or consists of a glycol spacer which has 2 (diethylene glycol), 3 (triethylene glycol), 4 (tetraethylene glycol; TEG), 5 (pentaethylene glycol), 6 (hexaethylene glycol; HEG), 7, 8, 9, 10, 11, 12, 13, 14, or 15 glycol units. In some aspects, S₁ is a tetraethylene glycol (TEG) or hexaethylene glycol (HEG) glycol spacer. In some aspects, the SP₂ optional first spacer comprises or consists of a glycol spacer which has 2 (diethylene glycol), 3 (triethylene glycol), 4 (tetraethylene glycol; TEG), 5 (pentaethylene glycol), 6 (hexaethylene glycol; HEG), 7, 8, 9, 10, 11, 12, 13, 14, or 15 glycol units. In some aspects, Sz is a tetraethylene glycol (TEG) or hexaethylene glycol (HEG) glycol spacer.

[0196] In some aspects, the SP₁ spacer comprises an alkyl spacer and the SP₂ spacer also comprises an alkyl spacer. In some aspects, the SP₁ spacer comprises a glycol spacer and the SP₂ spacer also comprises a glycol spacer. In some aspects, the SP₁ spacer comprises an alkyl spacer and the SP₂ spacer comprises a glycol spacer. In some aspects, the SP₁ spacer comprises a glycol spacer and the SP₂ spacer comprises an alkyl spacer. In some aspects, the SP₁ spacer consists of an alkyl spacer and the SP₂ spacer also consists of an alkyl spacer. In some aspects, the SP₁ spacer consists of a glycol spacer and the SP₂ spacer also consists of a glycol spacer. In some aspects, the SP₁ spacer consists of an alkyl spacer and the SP₂ spacer consists of a glycol spacer. In some aspects, the SP₁ spacer consists of a glycol spacer and the SP₂ spacer consists of an alkyl spacer.

[0197] In some aspects, each non-cleavable spacer is independently selected from the group consisting of alkyl (e.g., C2, C3, C4, C5, C6, C7 or C8), glycol (e.g., diethylene glycol, triethylene glycol, tetraethylene glycol (TEG), hexaethylene glycol (HEG), pentaethylene glycol, polyethylene glycol (PEG)), glycerol (e.g., diglycerol, triglycerol, tetraglycerol (TG), pentaglycerol, a hexaglycerol (HG), polyglycerol (PG)), succinimide, maleimide, or any combination thereof.

[0198] In some aspects, a spacer in an anchoring moiety [AM], a first (proximal) spacer [SP₁], a second (distal) spacer [SP₂], or any combination thereof can comprise or consist of a polyethylene glycol (PEG) characterized by the formula R₁—(O—CH₂—CH₂)ₙ— or R₁—(O—CH₂—CH₂)ₙ—O—, wherein R₁ is hydrogen, methyl or ethyl and n is an integer between 1 and 15. Thus, in some aspects, n is 1, 2, 3, 4, 5, 6, 7, 8, 9, 10, 11, 12, 13, 14 or 15. These PEG can be described as PEG₁, PEG₂, PEG₃, PEG₄, PEG₅, PEG₆, PEG₇, PEG₈, PEG₉, PEG₁₀, PEG₁₁, PEG₁₂, PEG₁₃, PEG₁₄ or PEG₁₅, or PEG₁-O—, PEG₂-O—, PEG₃-O—, PEG₄-O—, PEG₅-O—, PEG₆-O—, PEG₇-O—, PEG₈-O—, PEG₉-O—, PEG₁₀-O—, PEG₁₁-O—, PEG₁₂-O—, PEG₁₃-O—, PEG₁₄-O— or PEG₁₅-O—, respectively.

[0199] In some aspects, a spacer in an anchoring moiety [AM], a first (proximal) spacer [SP₁], a second (distal) spacer [SP₂], or any combination thereof can comprise or consist of a polyglycerol (PG) characterized by the formula ((R₁—O—(CH₂—CHOH—CH₂O)ₙ—), wherein R₁ is hydrogen, methyl or ethyl, and n is an integer between 1 and 15. Thus, in some aspects, n is 1, 2, 3, 4, 5, 6, 7, 8, 9, 10, 11, 12, 13, 14 or 15. These PEG can be described as PG₁, PG₂, PG₃, PG₄, PG₅, PG₆, PG₇, PG₈, PG₉, PG₁₀, PG₁₁, PG₁₂, PG₁₃, PG₁₄ or PG₁₅.

[0200] In some aspects, an L₁, L₂, or L₃ linkage, or any combination thereof can comprise or consist of a cleavable linkage comprising a redox cleavable linker, a reactive oxygen species cleavable linker, a pH dependent cleavable linker, an enzymatic cleavable linker, a protease cleavable linker, an esterase cleavable linker, a phosphatase cleavable linker, a photoactivated cleavable linker, a self-immolative linker, or any combination thereof. In some aspects, the L₁ linkage comprise a cleavable linkage comprising a redox cleavable linker, a reactive oxygen species cleavable linker, a pH dependent cleavable linker, an enzymatic cleavable linker, a protease cleavable linker, an esterase cleavable linker, a phosphatase cleavable linker, a photoactivated cleavable linker, a self-immolative linker, or any combination thereof. In some aspects, the L₁ linkage consists of a cleavable linkage comprising a redox cleavable linker, a reactive oxygen species cleavable linker, a pH dependent cleavable linker, an enzymatic cleavable linker, a protease cleavable linker, an esterase cleavable linker, a phosphatase cleavable linker, a photoactivated cleavable linker, a self-immolative linker, or any combination thereof. In some aspects, the L₂ linkage comprise a cleavable linkage comprising a redox cleavable linker, a reactive oxygen species cleavable linker, a pH dependent cleavable linker, an enzymatic cleavable linker, a protease cleavable linker, an esterase cleavable linker, a phosphatase cleavable linker, a photoactivated cleavable linker, a self-immolative linker, or any combination thereof. In some aspects, the L₂ linkage consists of a cleavable linkage comprising a redox cleavable linker, a reactive oxygen species cleavable linker, a pH dependent cleavable linker, an enzymatic cleavable linker, a protease cleavable linker, an esterase cleavable linker, a phosphatase cleavable linker, a photoactivated cleavable linker, a self-immolative linker, or any combination thereof. In some aspects, the L₃ linkage comprise a cleavable linkage comprising a redox cleavable linker, a reactive oxygen species cleavable linker, a pH dependent cleavable linker, an enzymatic cleavable linker, a protease cleavable linker, an esterase cleavable linker, a phosphatase cleavable linker, a photoactivated cleavable linker, a self-immolative linker, or any combination thereof. In some aspects, the L₃ linkage consists of a cleavable linkage comprising a redox cleavable linker, a reactive oxygen species cleavable linker, a pH dependent cleavable linker, an enzymatic cleavable linker, a protease cleavable linker, an esterase cleavable linker, a phosphatase cleavable linker, a photoactivated cleavable linker, a self-immolative linker, or any combination thereof.

[0201] In some aspects, a cleavable linkage disclosed herein, e.g., an L₁, L₂, or L₃ linkage or any combination thereof comprises or consists of a self-immolative linker (e.g., p-aminobenzyl carbamate, pABC). In some aspects, L₁ comprises a self-immolative linker (e.g., p-aminobenzyl carbamate, pABC). In some aspects, L₁ consists of a self-immolative linker (e.g., p-aminobenzyl carbamate, pABC). In some aspects, L₂ comprises a self-immolative linker (e.g., p-aminobenzyl carbamate, pABC). In some aspects, L₂ consists of a self-immolative linker (e.g., p-aminobenzyl carbamate, pABC). In some aspects, L₃ comprises a self-immolative linker (e.g., p-aminobenzyl carbamate, pABC). In some aspects, L₃ consists of a self-immolative linker (e.g., p-aminobenzyl carbamate, pABC).

[0202] In some aspects, a cleavable linkage disclosed herein, e.g., an L₁, L₂, or L₃ linkage or any combination thereof comprises or consists of a cinnamyl group, a naphthyl group, a biphenyl group, a heterocyclic ring, a homoaromatic group, coumarin, furan, thiophene, thiazole, oxazole, isoxazole, pyrrole, pyrazole, pyridine, imidazone, triazole, or any combination thereof. In some aspects, L₁ comprises a cleavable linker selected from the group consisting of a cinnamyl group, a naphthyl group, a biphenyl group, a heterocyclic ring, a homoaromatic group, coumarin, furan, thiophene, thiazole, oxazole, isoxazole, pyrrole, pyrazole, pyridine, imidazone, triazole, or any combination thereof. In some aspects, L₁ consists of a cleavable linker selected from the group consisting of a cinnamyl group, a naphthyl group, a biphenyl group, a heterocyclic ring, a homoaromatic group, coumarin, furan, thiophene, thiazole, oxazole, isoxazole, pyrrole, pyrazole, pyridine, imidazone, triazole, or any combination thereof. In some aspects, L₂ comprises a cleavable linker selected from the group consisting of a cinnamyl group, a naphthyl group, a biphenyl group, a heterocyclic ring, a homoaromatic group, coumarin, furan, thiophene, thiazole, oxazole, isoxazole, pyrrole, pyrazole, pyridine, imidazone, triazole, or any combination thereof. In some aspects, L₂ consists of a cleavable linker selected from the group consisting of a cinnamyl group, a naphthyl group, a biphenyl group, a heterocyclic ring, a homoaromatic group, coumarin, furan, thiophene, thiazole, oxazole, isoxazole, pyrrole, pyrazole, pyridine, imidazone, triazole, or any combination thereof. In some aspects, L₃ comprises a cleavable linker selected from the group consisting of a cinnamyl group, a naphthyl group, a biphenyl group, a heterocyclic ring, a homoaromatic group, coumarin, furan, thiophene, thiazole, oxazole, isoxazole, pyrrole, pyrazole, pyridine, imidazone, triazole, or any combination thereof. In some aspects, L₃ consists of a cleavable linker selected from the group consisting of a cinnamyl group, a naphthyl group, a biphenyl group, a heterocyclic ring, a homoaromatic group, coumarin, furan, thiophene, thiazole, oxazole, isoxazole, pyrrole, pyrazole, pyridine, imidazone, triazole, or any combination thereof.

[0203] In some aspects, a cleavable linkage disclosed herein, e.g., an L₁, L₂, or L₃ linkage or any combination thereof comprises or consists of a linkage (generally a dipeptide or tripeptide linker) having the formula:

-Aa-Yy-
[0204] wherein each -A- is independently an amino acid unit or a combination thereof, a is independently an integer from 1 to 15; -Y- is a spacer unit, and y is 0, 1, or 2. In some aspects, L₁ comprises or consists of a -Aa-Yy- linker described above. In some aspects, L₂ comprises or consists of a -Aa-Yy- linker described above. In some aspects, L₃ comprises or consists of a -Aa-Yy-linker described above.

[0205] In some aspects -Aa- is a dipeptide, a tripeptide, a tetrapeptide, a pentapeptide, or a hexapeptide. In some aspects wherein a is 2 (i.e., a dipeptide cleavable linker) -Aa- is selected from the group consisting of valine-alanine, valine-citrulline, phenylalanine-lysine, N-methylvaline-citrulline, cyclohexylalanine-lysine, and beta-alanine-lysine. In some aspects wherein a is 3 (i.e., a tripeptide cleavable linker) -Aa- is glutamic acid-valine-citrulline. In some aspects, y is 1, i.e., the cleavable linker of formula -Aa-Yy- comprises a single spacer. In some aspects, the cleavable linker of formula -Aa-Yy- can comprises more than spacer, e.g., two spacers. In some aspects, the two spacers are the same. In other aspects, the two spacers are different. In some aspects, the single spacer can be cleavable or non-cleavable. In some aspects, the first spacer (proximal to Aa) can be cleavable and the second spacer (distal to Aa) can be non-cleavable. In some aspects, the first spacer (proximal to Aa) can be non-cleavable and the second spacer (distal to Aa) can be cleavable. In some aspects, both spacers can be non-cleavable. In some aspects, both spacer can be cleavable.

[0206] In some aspects, a -Y- spacer can be a self-immolative spacer, e.g., p-aminobenzylcarbamate (pABC). The term “self-immolative spacer” as used herein refers to a spacer that will spontaneously separate from a first moiety (e.g., a biologically active molecule, linkage, spacer, or anchoring moiety) if its bond to a second moiety (e.g., a biologically active molecule, linkage, spacer, or anchoring moiety) is cleaved.

[0207] In some aspects, -Yy- has the formula:

[chemical structure]

[0208] wherein each R₂ is independently C₁₋₈ alkyl, —O—(C₁₋₈ alkyl), halogen, nitro, or cyano; and m is an integer from 0 to 4. In some aspects, m is 0, 1, or 2. In some aspects, m is 0.

[0209] In some aspects, a cleavable linkage disclosed herein, e.g., an L₁, L₂, or L₃ linkage or any combination thereof comprises or consists of valine-alanine-p-aminobenzylcarbamate or valine-citrulline-p-aminobenzylcarbamate.

[0210] In some aspects, -Y- is a non self-immolative spacer, e.g., a peptide spacer. Peptide spacers are generally Gly polymers or Gly/Ser polymers. In some aspects, the -Y-peptide spacer comprises or consists of -Gly- or -Gly-Gly-. Other peptide spacers such as the (Gly₄Ser)n spacer are disclosed more in detail below.

[0211] In some aspects, in addition or instead of a lipid, a vitamin, or a sterol, an anchoring moiety [AM] can comprise a scaffold protein (e.g., a Scaffold X protein such as PTGFRN or a fragment thereof), or a binding molecule which can bind to a scaffold protein present in the EV (e.g., exosome) membrane, for example, an antibody or a binding portion thereof that can specifically bind to PTGRN natively or recombinantly expressed on the surface of the EV (e.g., exosome). Thus, in some aspects, the anchoring moiety [AM] and/or the scaffold moiety is Scaffold X.

[0212] In some aspects, the Scaffold X is selected from the group consisting of prostaglandin F2 receptor negative regulator (the PTGFRN protein); basigin (the BSG protein); immunoglobulin superfamily member 2 (the IGSF2 protein); immunoglobulin superfamily member 3 (the IGSF3 protein); immunoglobulin superfamily member 8 (the IGSF8 protein); integrin beta-1 (the ITGB1 protein); integrin alpha-4 (the ITGA4 protein); 4F2 cell-surface antigen heavy chain (the SLC3A2 protein); a class of ATP transporter proteins (the ATP1A1, ATPIA2, ATPIA3, ATPIA4, ATPIB3, ATP2B1, ATP2B2, ATP2B3, ATP2B4 proteins); a functional fragment thereof; and any combination thereof. In some aspects, the Scaffold X is PTGFRN protein or a functional fragment thereof. In some aspects, the Scaffold X comprises an amino acid sequence as set forth in SEQ ID NO:302. In some aspects, the Scaffold X comprises an amino acid sequence at least about 50%, at least about 55%, at least about 60%, at least about 65%, at least about 70%, at least about 75%, at least about 80%, at least about 85%, at least about 90%, at least about 95%, at least about 96%, at least about 97%, at least about 98%, at least about 99%, or about 100% identical to SEQ ID NO:302. Different Scaffold X proteins are disclosed in detail below.

[0213] In some aspects, the biologically active molecule [BAM] is attached via an anchoring moiety [AM] to the exterior surface of the EV, wherein the [AM] and [BAM] are connected by an optimized linker disclosed herein (i.e., a linker comprising the specific architecture, components, and length constraint disclosed above). In some aspects, the biologically active molecule [BAM] comprises or consists of a polypeptide, a peptide, a polynucleotide (DNA and/or RNA), a chemical compound, or any combination thereof.

[0214] In some aspects, the biologically active molecule [BAM] comprises a chemical compound, e.g., a small molecule drug. In some aspects, the biologically active molecule [BAM] comprises an antisense oligonucleotide (ASO), a siRNA, a miRNA, a shRNA, an mRNA, a nucleic acid, an antimirs, an RNA decoy, or any combination thereof. In some aspects, the ASO is a gapmer. Specific nucleic acid biologically active molecules, e.g., ASOs against specific targets such as NLRP3, STAT6, CEBP/β, STAT3, NRas, KRAS, or Pmp22 are disclosed in detail below.

[0215] In some aspects, the biologically active molecule [BAM] comprises or consists of a peptide, a protein, an antibody or an antigen binding portion thereof, or any combination thereof. In some aspects, the antigen binding portion thereof comprises scFv, (scFv)2, Fab, Fab′, F(ab′)2, F(ab1)2, Fv, dAb, and Fd fragment, diabodys, antibody-related polypeptide, or any fragment thereof. In some aspects, the antibody or antigen binding portion thereof can bind to a Protein X protein present in the membrane of the EV (e.g., exosome).

[0216] In some aspects, biologically active molecule [BAM] comprises or consist of an ASO. In some aspects, the ASO can target pre-mRNA or a mature mRNA, including protein coding regions (exons), non coding regions (e.g., 5′ or 3′ unstranslated regions, or introns), intron-exon junctions, or regulatory regions (e.g., promoters). In some aspects, the ASO targets a protein transcript, e.g., a STAT6 transcript, a CEBP/β transcript, a STAT3 transcript, a KRAS transcript, a NRAS transcript, an NLPR3 transcript, or any combination thereof. Detailed descriptions of ASOs directed to specific targets are provided below.

[0217] In some aspects of the present disclosure, the EV is an exosome, for example, a native exosome, or an exosome overexpressing a recombinant protein, e.g., a Scaffold X protein such as PTGFRN or a functional portion thereof. Types of exosomes, including different sizes, compositions, or methods of manufacture are disclosed in detail below.

[0218] The present disclosure provides also pharmaceutical compositions comprising the EVs (extracellular vesicles) disclosed herein (e.g., exosomes), which comprise constructs such as the construct of Formula 1 comprising an optimized linker of the present disclosure, and a pharmaceutically acceptable carrier. Also provides is a kit comprising any EV or pharmaceutical composition disclosed herein, comprising constructs such as the construct of Formula 1, which comprise an optimized linker of the present disclosure and instructions for use.

[0219] The present disclose provides a method of treating or preventing a disease or disorder in a subject in need thereof comprising administering an EV (e.g., exosome) of the present disclosure or pharmaceutical composition comprising such EV (e.g., exosome) to the subject. In some aspects, the disease or disorder is a cancer, an inflammatory disorder, a neurodegenerative disorder, a central nervous disease, or a metabolic disease. In some aspects, an EV (e.g., exosome) disclosed herein can be administered intravenously, intraperitoneally, nasally, orally, intramuscularly, subcutaneously, parenterally, intrathecally, peritumorally, intraocularly, or intratumorally.

[0220] The present disclosure provides a method of attaching a biologically active molecule [BAM] to an EV (e.g., an exosome) comprising linking an anchoring moiety [AM] to the EV, wherein the anchoring moiety [AM] is attached to the biologically active moiety [BAM] according to the formula:

[AM]-L₁-[SP₁]-L₂-[SP₂]-L₃-[BAM]
[0221] wherein [AM] is the anchoring moiety; L₁ is a cleavable or non-cleavable linkage; L₂ and L₃ are optional cleavable or non-cleavable linkages; SP₁ is an optional first spacer; and, SP₂ is an optional second spacer. In some aspects, [AM] is cholesterol-C6, cholesterol-TEG, tocopherol-C8, tocopherol, of palmitate-C6. In some aspects, L₁ is a phosphodiester bond. In some aspects, SP₁ is C3, C6, TEG, or HEG. In some aspects, L₂ is a phosphorothioate bond. In some aspects, SP₂ is C3, C6, TEG or HEG. In some aspects, L₃ is a phosphorothioate bond. In some aspects, [BAM] is an antisense oligonucleotide (ASO), e.g., a gapmer. In some aspects, the length of the optimized linker connecting [AM] and [BAM] is about 5 nm to about 10 nm, about 10 nm to about 15 nm, about 15 nm to about 20 nm, about 20 nm to about 25 nm, or about 25 to about 30 nm.

[0222] The present disclosure also provides a method of increasing the load density of a biologically active molecule (BAM) attached to an EV, comprising screening a library of anchoring moieties (AM) attached to the biologically active moiety (BAM) according to the formula:

[AM]-L₁-[SP₁]-L₂-[SP₂]-L₃-[BAM]
[0223] wherein [AM] is the anchoring moiety; L₁ is a cleavable or non-cleavable linkage; L₂ and L₃ are optional cleavable or non-cleavable linkages; SP₁ is an optional first spacer; and, SP₂ is an optional second spacer. In some aspects, [AM] is cholesterol-C6, cholesterol-TEG, tocopherol-C8, tocopherol, of palmitate-C6. In some aspects, L₁ is a phosphodiester bond. In some aspects, SP₁ is C3, C6, TEG, or HEG. In some aspects, L₂ is a phosphorothioate bond. In some aspects, SP₂ is C3, C6, TEG or HEG. In some aspects, L₃ is a phosphorothioate bond. In [BAM] is an antisense oligonucleotide (ASO). In some aspects, the length of the optimized linker connecting [AM] and [BAM] is about 5 nm to about 10 nm, about 10 nm to about 15 nm, about 15 nm to about 20 nm, about 20 nm to about 25 nm, or about 25 to about 30 nm. In some aspects, the load density of a biologically active molecule [BAM] attached to an EV, e.g., an exosome, is increased at least about 1-fold, at least about 1.5-fold, at least about 2-fold, at least about 2.5-fold, at least about 3-fold, at least about 3.5-fold, at last about 4-fold, at least about 4.5-fold, at least about 5-fold, at least about 5.5-fold, at least about 6-fold, at least about 6.5-fold, at least about 7-fold, at least about 7.5-fold, at least about 8-fold, at least about 8.5-fold, at least about 9-fold, at least about 9.5-fold, or at least about 10-fold with respect to a control. In some aspects, the control is a corresponding construct lacking the optimized linker. For example, in some aspects, the control for a construct with the structure [AM]-L₁-[SP₁]-L₂-[SP₂]-L₃-[BAM] is a control construct with the structure [AM]-[BAM].

[0224] An extracellular vesicle (EV) comprising an antisense oligonucleotide [ASO] covalently linked to the EV via an anchoring moiety [AM] according to the formula:

[AM]-L₁-[SP₁]-L₂-[SP₂]-L₃-[ASO]
[0225] wherein [AM] is the anchoring moiety selected from the group consisting of cholesterol-C6, cholesterol-TEG, tocopherol-C8, tocopherol, and palmitate-C6; L₁ is a phosphodiesterase cleavable linkage; SP is an optional first spacer selected from the group consisting of C3, C6, TEG and HEG; L₂ is optional phosphorothioate non-cleavable linkage; SP₂ is an optional second spacer selected from the group consisting of C3, C6, TEG, and HEG; and, L₃ is an optional phosphorothioate non-cleavable linkage. In some aspects, the EV is an exosome, e.g., a native exosome or a recombinant exosome. In some aspects wherein the exosome is a native exosome, the load density of ASO attached to the exosome is increased by at least about 1.5-fold with respect to a control (see above). In some aspects wherein the exosome is an exosome overexpressing PTGFRN the load density of ASO attached to the exosome is increased by at least about 2-fold with respect to a control, e.g., a construct without an optimized linker such as [AM]-[BAM].

[0226] In some aspects wherein the exosome is a native exosome and the anchoring moiety [AM] is cholesterol-C6. In some aspects, the average number of ASO molecules per native exosome is 5032+/−386. In some aspects, the average number of ASO molecules per native exosome is between about 4500 and about 5500. In some aspects, the average number of ASO molecules per native exosome is between about 4500 and about 4600, between about 4600 and about 4700, between about 4700 and about 4800, between about 4800 and about 4900, between about 4900 and about 5000, between about 5000 and about 5100, between about 5100 and about 5200, between about 5200 and about 5300, between about 5300 and about 5400, or between about 5400 and about 5500. In some aspects, the average number of ASO molecules per native exosome is at least about 4500, at least about 4600, at least about 4700, at least about 4800, at least about 4900, at least about 5000, at least about 5100, at least about 5200, at least about 5300, at least about 5400, or at least about 5500. In some aspects, the loading efficiency of the native exosome is 73% to 93%. In some aspects, the loading efficiency of the native exosome is between about 70% and about 95%. In some aspects, the loading efficiency of the native exosome is between about 70% and about 75%, between about 75% and about 80%, between about 80% and about 85%, between about 85% and about 90%, or between about 90% and about 95%. In some aspects, the loading efficiency of the native exosome is at least about 70%, at least about 75%, at least about 80%, at least about 85%, at least about 90%, or at least about 95%.

[0227] In some aspects wherein the exosome is a native exosome and the anchoring moiety [AM] is cholesterol-TEG, the average number of ASO molecules per exosome is 3991+/−490. In some aspects, the average number of ASO molecules per native exosome is between about 3500 and about 4500. In some aspects, the average number of ASO molecules per native exosome is between about 3500 and about 3600, between about 3600 and about 3700, between about 3700 and about 3800, between about 3800 and about 3900, between about 3900 and about 4000, between about 4000 and about 4100, between about 4100 and about 4200, between about 4200 and about 4300, between about 4300 and about 4400, or between about 4400 and about 4500. In some aspects, the average number of ASO molecules per native exosome is at least about 3500, at least about 3600, at least about 3700, at least about 3800, at least about 3900, at least about 4000, at least about 4100, at least about 4200, at least about 4300, at least about 4400, or at least about 4500. In some aspects, the loading efficiency of the native exosome is 56% to 79%. In some aspects, the loading efficiency of the native exosome is between about 50% and about 85%. In some aspects, the loading efficiency of the native exosome is between about 50% and about 55%, between about 55% and about 60%, between about 60% and about 65%, between about 65% and about 70%, between about 70% and about 75%, between about 75% and about 80%, or between about 80% and about 85%. In some aspects, the loading efficiency of the native exosome is at least about 50%, at least about 55%, at least about 60%, at least about 65%, at least about 70%, at least about 75%, at least about 80%, or at least about 85%.

[0228] In some aspects wherein the exosome is a native exosome and the anchoring moiety [AM] is tocopherol-C8, tocopherol, or palmitate-C6, the average number of ASO molecules per native exosome is 4241+/−722. In some aspect, the average number of ASO molecules per native exosome is between about 3500 and about 5000. In some aspect, the average number of ASO molecules per native exosome is between about 3500 and about 3600, between about 3600 and about 3700, between about 3700 and about 3800, between about 3800 and about 3900, between about 3900 and about 4000, between about 4000 and about 4100, between about 4100 and about 4200, between about 4200 and about 4300, between about 4300 and about 4400, between about 4400 and about 4500, between about 4500 and about 4600, between about 4600 and about 4700, between about 4700 and about 4800, between about 4800 and about 4900, or between about 4900 and about 5000. In some aspects, the average number of ASO molecules per native exosome is at least about 3500, at least about 3600, at least about 3700, at least about 3800, at least about 3900, at least about 4000, at least about 4100, at least about 4200, at least about 4300, at least about 4400, at least about 4500, at least about 4600, at least about 4700, at least about 4800, at least about 4900, or at least about 5000. In some aspects, the loading efficiency of the native exosome is 57% to 73%. In some aspects, the loading efficiency of the native exosome is between about 50% and about 80%. In some aspects, the loading efficiency of the native exosome is between about 50% and about 55%, between about 55% and about 60%, between about 60% and about 65%, between about 65% and about 70%, between about 70% and about 75%, or between about 75% and about 80%. In some aspects, the loading efficiency of the native exosome is at least about 50%, at least about 55%, at least about 60%, at least about 65%, at least about 70%, at least about 75%, or at least about 80%. In some aspects, the average number of ASO molecules per native exosome is more than 5000, more than 6000, more than 7000, more than 8000, more than 9000, more than 10,000, more than 11,000, more than 12,000, more than 13,000, more than 14,000, more than 15,000, more than 16,000, more than 17,000, more than 18,000, more than 19,000, or more than 20,000. In some aspects, the average number of ASO molecules per exosome is between about 5000 and about 6,000, about 6,000 and about 7,000, about 7,000 and about 8,000, about 8,000 and about 9,000, about 9,000 and about 10,000, about 10,000 and about 11,000, about 11,000 and about 12,000 about 12,000 and about 13,000, about 13,000 and about 14,000, about 14,000 and about 15,000, about 15,000 and about 16,000, about 16,000 and about 17,000, about 17,000 and about 18,000, about 18,000 and about 19,000, or about 19,0000 and about 20,000.

[0229] In some aspects wherein the exosome is a Scaffold-X exosome and the anchoring moiety [AM] is cholesterol-C6, the average number of ASO molecules per exosome is 2442+/−339. In some aspects, the average number of ASO molecules per Scaffold-X exosome is between about 2000 and about 3000. In some aspects, the average number of ASO molecules per Scaffold-X exosome is between about 2000 and about 2100, between about 2100 and about 2200, between about 2200 and about 2300, between about 2300 and about 2400, between about 2400 and about 2500, between about 2500 and about 2600, between about 2600 and about 2700, between about 2700 and about 2800, between about 2800 and about 2900, or between about 2900 and about 3000. In some aspects, the average number of ASO molecules per Scaffold-X exosome is at least about 2000, at least about 2100, at least about 2200, at least about 2300, at least about 2400, at least about 2500, at least about 2600, at least about 2700, at least about 2800, at least about 2900, or at least about 3000. In some aspects, the loading efficiency of the Scaffold-X exosome is 27% to 46%. In some aspects, the loading efficiency of the Scaffold-X exosome is between about 25% and about 50%. In some aspects, the loading efficiency of the Scaffold-X exosome is between about 25% and about 30%, between about 30% and about 35%, between about 35% and about 40%, between about 40% and about 45%, or between about 45% and about 50%. In some aspects, the loading efficiency of the Scaffold-X exosome is at least about 25%, at least about 30%, at least about 35%, at least about 40%, at least about 45%, or at least about 50%.

[0230] In some aspects wherein the exosome is a Scaffold-X exosome and the anchoring moiety [AM] is cholesterol-TEG, the average number of ASO molecules per exosome is 1728+/−264. In some aspects, the average number of ASO molecules per Scaffold-X exosome is between about 1400 and about 2100. In some aspects, the average number of ASO molecules per Scaffold-X exosome is between about 1400 and about 1500, between about 1500 and about 1600, between about 1600 and about 1700, between about 1700 and about 1800, between about 1800 and about 1900, between about 1900 and about 2000, or between about 2000 and about 2100. In some aspects, the average number of ASO molecules per Scaffold-X exosome is at least about 1400, at least about 1500, at least about 1600, at least about 1700, at least about 1800, at least about 1900, at least about 2000, or at least about 2100. In some aspects, the loading efficiency of the Scaffold-X exosome is 19% to 33%. In some aspects, the loading efficiency of the Scaffold-X exosome is between about 15% and about 35%. In some aspects, the loading efficiency of the Scaffold-X exosome is between about 15% and about 20%, between about 20% and about 25%, between about 25% and about 30%, or between about 30% and about 35%. In some aspects, the loading efficiency of the Scaffold-X exosome is at least about 15%, at least about 20%, at least about 25%, at least about 30%, or at least about 35%. In some aspects wherein the exosome is a Scaffold-X exosome and the anchoring moiety [AM] is tocopherol-C8, tocopherol, or palmitate-C6, the average number of ASO molecules per exosome is 2979+/−1006. In some aspects, the average number of ASO molecules per Scaffold-X exosome is between about 1900 and about 4000. In some aspects, the average number of ASO molecules per Scaffold-X exosome is between about 1900 and about 2000, between about 2000 and about 2100, between about 2100 and about 2200, between about 2200 and about 2300, between about 2300 and about 2400, between about 2400 and about 2500, between about 2500 and about 2600, between about 2600 and about 2700, between about 2700 and about 2800, between about 2800 and about 2900, between about 2900 and about 3000, between about 3000 and about 3100, between about 3100 and about 3200, between about 3200 and about 3300, between about 3300 and about 3400, between about 3400 and about 3500. between about 3500 and about 3600, between about 3600 and about 3700, between about 3700 and about 3800, between about 3800 and about 3900, or between about 3900 and about 4000. In some aspects, the average number of ASO molecules per Scaffold-X exosome is at least about 1900, at least about 2000, at least about 2100, at least about 2200, at least about 2300, at least about 2400, at least about 2500, at least about 2600, at least about 2700, at least about 2800, at least about 2900, at least about 3000, at least about 3100, at least about 3200, at least about 3300, at least about 3400, at least about 3500, at least about 3600, at least about 3700, at least about 3800, at least about 3900, or at least about 4000. In some aspects, the loading efficiency of the Scaffold-X exosome is 37% to 68%. the loading efficiency is between about 30% and about 75%. In some aspects, the loading efficiency is between about 30% and about 35%, between about 35% and about 40%, between about 40% and about 45%, between about 45% and about 50%, between about 50% and about 55%, between about 55% and about 60%, between about 60% and about 65%, between about 65% and about 70%, or between about 70% and about 75%. In some aspects, the loading efficiency of the Scaffold-X exosome is at least about 30%, at least about 35%, at least about 40%, at least about 45%, at least about 50%, at least about 55%, at least about 60%, at least about 65%, at least about 70%, or at least about 75%.

[0231] In some aspects, the average number of ASO molecules per Scaffold-X exosome is more than 5000, more than 6000, more than 7000, more than 8000, more than 9000, more than 10,000, more than 11,000, more than 12,000, more than 13,000, more than 14,000, more than 15,000, more than 16,000, more than 17,000, more than 18,000, more than 19,000, or more than 20,000. In some aspects, the average number of ASO molecules per Scaffold-X exosome is between about 5000 and about 6,000, about 6,000 and about 7,000, about 7,000 and about 8,000, about 8,000 and about 9,000, about 9,000 and about 10,000, about 10,000 and about 11,000, about 11,000 and about 12,000 about 12,000 and about 13,000, about 13,000 and about 14,000, about 14,000 and about 15,000, about 15,000 and about 16,000, about 16,000 and about 17,000, about 17,000 and about 18,000, about 18,000 and about 19,000, or about 19,0000 and about 20,000

[0232] The present disclosure also provides an exosome comprising an antisense oligonucleotide [ASO] covalently linked to the exosome via an anchoring moiety [AM] according to the formula:

[AM]-L₁-[SP₁]-L₂-[SP₂]-L₃-[BAM]
[0233] wherein [AM] is cholesterol-TEG; L₁ is a phosphodiesterase cleavable bond; SP₁ is C3; L₂ is a phosphorothioate non-cleavable bond; SP₂ is TEG; and, L₃ is a phosphorothioate non-cleavable bond. When the exosome is a native exosome the average number of ASO molecules per exosome is at least 4500, for example, between about 4500 and about 5000 (e.g., about 4780), and the loading efficiency is at least about 70%, for example, between about 70% and about 90% (e.g., about 80%). When the exosome is an exosome overexpressing PTGFRN, the average number of ASO molecules per exosome is at least about 1500, for example, between about 1500 and about 2000 (e.g., about 1659) and the loading efficiency is at least about 20%, for example, between about 20% and about 35% (e.g., about 28%).

[0234] The present disclosure also provides an exosome comprising an antisense oligonucleotide [ASO] covalently linked to the exosome via an anchoring moiety [AM] according to the formula:

[AM]-L₁-[SP₁]-L₂-[BAM]
[0235] wherein [AM] is cholesterol-TEG; L₁ is a phosphodiesterase cleavable bond; SP₁ is TEG; and L₂ is a phosphorothioate non-cleavable bond. When the exosome is a native exosome, the average number of ASO molecules per exosome is at least about 3500, for example, between about 3500 and about 4500 (e.g., about 4090), and the loading efficiency is at least about 60%, for example, between about 60% and about 70% (e.g., about 68%). When the exosome is an exosome overexpressing PTGFRN, the average number of ASO molecules per exosome is at least about 1400, for example, between about 1400 and about 2400 (e.g., about 1890) and the loading efficiency is at least about 20%, for example, between about 20% and about 40% (e.g., about 31%).

[0236] Specific optimized linker combinations of the present disclosure are presented, e.g., in FIG. 4, FIG. 5, FIG. 9A, FIG. 11, and FIG. 13.

[0237] In some aspects the present disclosure, provides an exosome comprising a biologically active molecule [BAM] covalently linked to the exosome via an anchoring moiety [AM] according to the formula: [AM]-[SP₁]-L₁-[SP₂]-[BAM], wherein [AM] is a lipid anchor, [SP₁] is a first spacer (proximal with respect to the exosome surface), [SP₂] is a second spacer (distal with respect to the exosome surface), [BAM] is a biologically active molecule disclosed herein, and [SP₁] and [SP₂] are linked by a cleavable linker. In some aspects, the cleavable linker is a phosphodiester cleavable linker. In some aspects, the lipid is selected from the group consisting of palmitic acid, cholesterol, tocopherol, and 16:0 Cyanur (cyanuric chloride) ethanolamine (PE). In some aspects, Spacer 1 is selected from the group consisting of C3, C6, C8, TEG, and None. In some aspects, Spacer 2 is selected from the group consisting of C3, TEG, HEG and None. None indicates that there is no Spacer 1 or Spacer 2 in the construct.

[0238] In some aspects the present disclosure, provides an exosome comprising an antisense oligonucleotide [ASO] covalently linked to the exosome via an anchoring moiety [AM] according to the formula: [AM]-[SP₁]-L₁-[SP₂]-[ASO], wherein [AM] is a lipid anchor, [SP₁] is a first spacer (proximal with respect to the exosome surface), [SP₂] is a second spacer (distal with respect to the exosome surface), [ASO] is an antisense oligonucleotide, and [SP₁] and [SP₂] are linked by a cleavable linker. In some aspects, the cleavable linker is a phosphodiester cleavable linker. In some aspects, the lipid is selected from the group consisting of palmitic acid, cholesterol, tocopherol, and 16:0 Cyanur (cyanuric chloride) PE. In some aspects, Spacer 1 is selected from the group consisting oa C3, C6, C8, TEG, and None. In some aspects, Spacer 2 is selected from the group consisting of C3, TEG, HEG and None.

[0239] In some aspects, the present disclosure provides a membrane anchoring construct according to the formula [AM]-[SP₁]-L₁-[SP₂]—, wherein [AM] is a lipid anchor, [SP₁] is a first spacer (proximal with respect to the membrane of a vesicle, e.g., an exosome), [SP₂] is a second spacer (distal with respect to the membrane of a vesicle, e.g., an exosome), and [SP₁] and [SP₂] are linked by a cleavable linker. In some aspects, the cleavable linker is a phosphodiester cleavable linker. In some aspects, the lipid is selected from the group consisting of palmitic acid, cholesterol, tocopherol, and 16:0 Cyanur (cyanuric chloride) PE. In some aspects, Spacer 1 is selected from the group consisting oa C3, C6, C8, TEG, and None. In some aspects, Spacer 2 is selected from the group consisting of C3, TEG, HEG and None.

[0240] In some aspects, the present disclosure provides a construct selected from the group consisting of tocopherol-C8-TEG-[ASO], tocopherol-TEG-None-[ASO], cholesterol-TEG-C3-[ASO], cholesterol-C6-C3-[ASO], cholesterol-TEG-HEG-[ASO], cholesterol-TEG-None-[ASO], and palmitate-C6-HEG-[ASO].

[0241] In some aspects, the present disclosure provides an exosome comprising a membrane-anchored construct selected from the group consisting of tocopherol-C8-TEG-[ASO], tocopherol-TEG-None-[ASO], cholesterol-TEG-C3-[ASO], cholesterol-C6-C3-[ASO], cholesterol-TEG-HEG-[ASO], cholesterol-TEG-None-[ASO], and palmitate-C6-HEG-[ASO].

[0242] In some aspects, the present disclosure provides a membrane anchoring construct selected from the group consisting of tocopherol-C8-TEG, tocopherol-TEG-None, cholesterol-TEG-C3, cholesterol-C6-C3, cholesterol-TEG-HEG, cholesterol-TEG-None, and palmitate-C6-HEG. In some aspects, the membrane anchoring construct comprises, consists, or consists essentially of tocopherol-C8-TEG. In some aspects, the membrane anchoring construct comprises, consists, or consists essentially of tocopherol-TEG-None. In some aspects, the membrane anchoring construct comprises, consists, or consists essentially of cholesterol-TEG-C3. In some aspects, the membrane anchoring construct comprises, consists, or consists essentially of cholesterol-C6-C3. In some aspects, the membrane anchoring construct comprises, consists, or consists essentially of cholesterol-TEG-HEG. In some aspects, the membrane anchoring construct comprises, consists, or consists essentially of cholesterol-TEG-None. In some aspects, the membrane anchoring construct comprises, consists, or consists essentially of palmitate-C6-HEG.

[0243] In some aspects, the present disclosure provides an exosome comprising a biologically active molecule covalently linked to the surface of the exosome via a membrane anchoring construct selected from the group consisting of tocopherol-C8-TEG, tocopherol-TEG-None, cholesterol-TEG-C3, cholesterol-C6-C3, cholesterol-TEG-HEG, cholesterol-TEG-None, and palmitate-C6-HEG. In some aspects, the membrane anchoring construct comprises, consists, or consists essentially of tocopherol-C8-TEG. In some aspects, the membrane anchoring construct comprises, consists, or consists essentially of tocopherol-TEG-None. In some aspects, the membrane anchoring construct comprises, consists, or consists essentially of cholesterol-TEG-C3. In some aspects, the membrane anchoring construct comprises, consists, or consists essentially of cholesterol-C6-C3. In some aspects, the membrane anchoring construct comprises, consists, or consists essentially of cholesterol-TEG-HEG. In some aspects, the membrane anchoring construct comprises, consists, or consists essentially of cholesterol-TEG-None. In some aspects, the membrane anchoring construct comprises, consists, or consists essentially of palmitate-C6-HEG.

[0244] In some aspects, the exosomes disclosed herein can be prepared and/or stored under conditions that preserve the stability of the exosome and/or promote higher load density. In some aspects, an exosome comprising an ASO attached to its surface via a membrane anchoring construct selected from the group consisting of tocopherol-C8-TEG, tocopherol-TEG-None, cholesterol-TEG-C3, cholesterol-C6-C3, cholesterol-TEG-HEG, cholesterol-TEG-None, and palmitate-C6-HEG, can be maintained in a low salt buffer (e.g., comprising about 50 mM NaCl) for about 2, 4, 6 or 8 days. In some aspects, an exosome comprising an ASO attached to its surface via a membrane anchoring construct selected from the group consisting of tocopherol-C8-TEG, tocopherol-TEG-None, cholesterol-TEG-C3, cholesterol-C6-C3, cholesterol-TEG-HEG, cholesterol-TEG-None, and palmitate-C6-HEG, can be maintained in a high salt buffer (e.g., comprising about 150 mM NaCl) for about 2, 4, 6 or 8 days. In some aspects, an exosome comprising an ASO attached to its surface via a membrane anchoring construct selected from the group consisting of tocopherol-C8-TEG, tocopherol-TEG-None, cholesterol-TEG-C3, cholesterol-C6-C3, cholesterol-TEG-HEG, cholesterol-TEG-None, and palmitate-C6-HEG, can be maintained in a high salt buffer (e.g., comprising about 150 mM NaCl) further comprising sucrose for about 2, 4, 6 or 8 days. In some aspects, an exosome comprising an ASO attached to its surface via a membrane anchoring construct selected from the group consisting of tocopherol-C8-TEG, tocopherol-TEG-None, cholesterol-TEG-C3, cholesterol-C6-C3, cholesterol-TEG-HEG, cholesterol-TEG-None, and palmitate-C6-HEG, can be maintained in a low salt buffer, high salt buffer, or high salt buffer (e.g., comprising about 150 mM NaCl) further comprising sucrose for about 2, 4, 6 or 8 days, at either 4° C. or 25° C.

[0245] The present disclosure also provides a method to increase the loading density of an exosome comprising loading the exosome under high salt conditions (e.g., using a high salt buffer comprising about 150 mM NaCl). In some aspects, the exosome is loaded with an ASO attached (e.g., covalently attached) to a membrane anchoring construct selected, for example, from the group consisting of tocopherol-C8-TEG, tocopherol-TEG-None, cholesterol-TEG-C3, cholesterol-C6-C3, cholesterol-TEG-HEG, cholesterol-TEG-None, and palmitate-C6-HEG.

### Anchoring Moieties [AM]

[0246] The constructs disclosed herein, e.g., constructs of Formula 1 comprise at least one anchoring moiety [AM] that anchor at least one biologically active molecule [BAM] to the surface of an EV, e.g., an exosome, via an optimized liner of the present disclosure. Suitable anchoring moieties [AM] capable of anchoring a biologically active molecule [BAM] to the surface of an EV, e.g., an exosome, comprise for example sterols (e.g., cholesterol), lipids, phospholipids, lysophospholipids, fatty acids, fat-soluble vitamins, scaffolding moieties (e.g., Protein X), or combinations thereof as described in detail below.

[0247] In some aspects, the anchoring moiety [AM] comprises or consists of a lipid. A lipid anchoring moiety [AM] can comprise any lipid known in the art, e.g., palmitic acid or glycosylphosphatidylinositols. In some aspects, the lipid, is a fatty acid, phosphatide, phospholipid (e.g., phosphatidyl choline, phosphatidyl serine, or phosphatidyl ethanolamine), or analogue thereof (e.g. phosphatidylcholine, lecithin, phosphatidylethanolamine, cephalin, or phosphatidylserine or analogue or portion thereof, such as a partially hydrolyzed portion thereof).

[0248] Generally, anchoring moieties are chemically attached, e.g., via solid phase synthesis. However, an anchoring moiety [AM] can be attached to a biologically active molecule [BAM] enzymatically. The anchoring moiety [AM] can be conjugated to a biologically active molecule [BAM] directly or indirectly via a linker or spacer combination, at any chemically feasible location, e.g., at the 5′ and/or 3′ end of a nucleotide sequence, e.g., an ASO. In one aspect, the anchoring moiety [AM] is conjugated only to the 3′ end of the biologically active molecule [BAM], directly or indirectly via an optimized linker disclosed herein. In one aspect, the anchoring moiety [AM] is conjugated only to the 5′ end of a nucleotide sequence, e.g., an ASO. In one aspect, the anchoring moiety [AM] is conjugated at a location which is not the 3′ end or 5′ end of a nucleotide sequence, e.g., an ASO.

[0249] In some aspects, anchoring moieties [AM] of the present disclosure can comprise any of the hydrophobic group modifications disclosed below:

| Modification | Modifying Group |
|---|---|
| S-Palmitoylation | [chemical structure] |
| N-Palmitoylation | [chemical structure] |
| N-Myristoylation | [chemical structure] |
| O-Acylation | [chemical structure] |
| Farnesylation | [chemical structure] |
| Geranylgeranylation | [chemical structure] |
| Cholesterol | [chemical structure] |

[0250] In some aspects, an anchoring moiety of the present disclosure can comprise two or more types of anchoring moieties disclosed herein. For example, in some aspects, an anchoring moiety can comprise two lipids, e.g., a phospholipids and a fatty acid, or two phospholipids, or two fatty acids, or a lipid and a vitamin, or cholesterol and a vitamin, etc. which taken together have 6-30 carbon atoms (i.e., an equivalent carbon number (ECN) of 6-30).

### Anchoring Moieties: Cholesterol and Other Sterols

[0251] In some aspects, the anchoring moiety [AM] comprises a sterol, steroid, hopanoid, hydroxysteroid, secosteroid, or analog thereof with lipophilic properties. In some aspects, the anchoring moiety comprises a sterol, such as a phytosterol, mycosterol, or zoosterol. Exemplary zoosterols include cholesterol and 24S-hydroxycholesterol; exemplary phytosterols include ergosterol (mycosterol), campesterol, sitosterol, and stigmasterol. In some aspects, the sterol is selected from ergosterol, 7-dehydrocholesterol, cholesterol, 24S-hydroxycholesterol, lanosterol, cycloartenol, fucosterol, saringosterol, campesterol, β-sitosterol, sitostanol, coprostanol, avenasterol, or stigmasterol. Sterols may be found either as free sterols, acylated (sterol esters), alkylated (steryl alkyl ethers), sulfated (sterol sulfate), or linked to a glycoside moiety (steryl glycosides), which can be itself acylated (acylated sterol glycosides).

[0252] In some aspects, the anchoring moiety [AM] comprises a steroid. In some aspects, the steroid is selected from dihydrotestosterone, uvaol, hecigenin, diosgenin, progesterone, or cortisol.

[0253] For example, sterols may be attached (via solid phase synthesis or conjugation), e.g., to a spacer [SP] via the available —OH group of the sterol. Exemplary sterols have the general skeleton shown below:

[chemical structure]

[0254] As a further example, ergosterol has the structure below:

[chemical structure]

[0255] Cholesterol has the structure below:

[chemical structure]

[0256] In some aspects, the sterol or steroid is a phosphoramidite. In some aspects, the sterol or steroid is a phosphoramidite comprising a linker, e.g., an alkyl (C3, C6 or C8) or a glycol linker (e.g., TEG). In some aspects, the sterol/steroid-phosphoramidite, or sterol/steroid-linker-phosphoramidite is attached to a spacer [SP] or to a biologically active molecule [BAM] via solid phase synthesis, for example, via a cleavable (e.g., phosphodiester) or non-cleavable (e.g., phosphorothioate) linkage.

### Anchoring Moieties: Fatty Acids

[0257] In some aspects, the anchoring moiety [AM] comprises a fatty acid. In some aspects, the fatty acid is a short-chain, medium-chain, or long-chain fatty acid. In some aspects, the fatty acid is a saturated fatty acid. In some aspects, the fatty acid is an unsaturated fatty acid. In some aspects, the fatty acid is a monounsaturated fatty acid. In some aspects, the fatty acid is a polyunsaturated fatty acid, such as an ω-3 (omega-3) or ω-6 (omega-6) fatty acid.

[0258] In some aspects, the lipid, e.g., fatty acid, has a C₂-C₁₈ chain. In some aspects, the lipid, e.g., fatty acid, has a C₂, C₃, C₄, C₅, C₆, C₇, C₈, C₉, C₁₀, C₁₁, C₁₂, C₁₃, C₁₄, C₁₅, C₁₆, C₁₇, or C₁₈ chain. In some aspects, the fatty acid, has a C₂ chain. In some aspects, the fatty acid, has a C₃ chain. In some aspects, the fatty acid, has a C₄ chain. In some aspects, the fatty acid, has a C₅ chain. In some aspects, the fatty acid, has a C₆ chain. In some aspects, the fatty acid, has a C₇ chain. In some aspects, the fatty acid, has a C₈ chain. In some aspects, the fatty acid, has a C₉ chain. In some aspects, the fatty acid, has a C₁₀ chain. In some aspects, the fatty acid, has a Cu chain. In some aspects, the fatty acid, has a C₁₂ chain. In some aspects, the fatty acid, has a C₁₃ chain. In some aspects, the fatty acid, has a C₁₄ chain. In some aspects, the fatty acid, has a C₁₅ chain. In some aspects, the fatty acid, has a C₁₆ chain. In some aspects, the fatty acid, has a C₁₇ chain. In some aspects, the fatty acid, has a Cis chain.

[0259] In some aspects, the fatty acid, has a C₄-C₁₈ chain. In some aspects, the fatty acid, has a C₂-C₃, C₂-C₄, C₂-C₅, C₂-C₆, C₂-C₇, C₂-C₈, C₂-C₉, C₂-C₁₀, C₂-C₁, C₂-C₁₂, C₂- C₁₃, C₂-C₁₄, C₂-C₁₅, C₂-C₁₆, C₂-C₁₇, C₂-C₁₈, C₃-C₄, C₃-C₅, C₃-C₆, C₃-C₇, C₃-C₈, C₃-C₉, C₃-C₁₀, C₃-C₁₁, C₃-C₁₂, C₃-C₁₃, C₃-C₁₄, C₃-C₁₅, C₃-C₁₆, C₃-C₁₇, C₃-C₁₈, C₄-C₅, C₄-C₆, C₄-C₇, C₄-C₈, C₄- C₉, C₄-C₁₀, C₄-C₁, C₄-C₁₂, C₄-C₁₃, C₄-C₁₄, C₄-C₁₅, C₄-C₁₆, C₄-C₁₇, C₄-C₁₈, C₅-C₆, C₅-C₇, C₅-C₈, C₅-C₉, C₅-C₁₀, C₅-C₁₁, C₅-C₁₂, C₅-C₁₃, C₅-C₁₄, C₅-C₁₅, C₅-C₁₆, C₅-C₁₇, C₅-C₁₈, C₆-C₇, C₆-C₈, C₆- C₉, C₆-C₁₀, C₆-C₁₁, C₆-C₁₂, C₆-C₁₃, C₆-C₁₄, C₆-C₁₅, C₆-C₁₆, C₆-C₁₇, C₆-C₁₈, C₇-C₈, C₇-C₉, C₇-C₁₀, C₇-C₁, C₇-C₁₂, C₇-C₁₃, C₇-C₁₄, C₇-C₁₅, C₇-C₁₆, C₇-C₁₇, C₇-C₁₈, C₈-C₉, C₈-C₁₀, C₈-C₁₁, C₈-C₁₂, C₈- C₁₃, C₈-C₁₄, C₈-C₁₅, C₈-C₁₆, C₈-C₁₇, C₈-C₁₈, C₉-C₁₀, C₉-C₁₁, C₉-C₁₂, C₉-C₁₃, C₉-C₁₄, C₉-C₁₅, C₉-C₁₆, C₉-C₁₇, C₉-C₁₈, C₁₀-C₁₁, C₁₀-C₁₂, C₁₀-C₁₃, C₁₀-C₁₄. C₁₀-C₁₅. C₁₀-C₁₆, C₁₀-C₁₇, C₁₀-C₁₈, C₁₁-C₁₂, C₁₁-C₁₃, C₁₁-C₁₄, C₁₁-C₁₅, C₁₁-C₁₆, C₁₁-C₁₇, C₁₁-C₁₈, C₁₂-C₁₃, C₁₂-C₁₄, C₁₂-C₁₅, C₁₂-C₁₆, C₁₂-C₁₇, C₁₂-C₁₈, C₁₃-C₁₄, C₁₃-C₁₅, C₁₃-C₁₆, C₁₃-C₁₇, C₁₃-C₁₈, C₁₄-C₁₅, C₁₄-C₁₆, C₁₄-C₁₇, C₁₄-C₁₈, C₁₅-C₁₆, C₁₅-C₁₇, C₁₅-C₁₈, C₁₆-C₁₇, C₁₆-C₁₈, or C₁₇-C₁₈ chain.

[0260] In some aspects, the anchoring moiety [AM] comprises two fatty acids, each of which is independently selected from a fatty acid having a chain with any one of the foregoing ranges or numbers of carbon atoms. In some aspects, one of the fatty acids is independently a fatty acid with a C₂-C₃, C₂-C₄, C₂-C₅, C₂-C₆, C₂-C₇, C₂-C₈, C₂-C₉, C₂-C₁₀, C₂-C₁₁, C₂-C₁₂, C₂-C₁₃, C₂-C₁₄, C₂-C₁₅, C₂-C₁₆, C₂-C₁₇, C₂-C₁₈, C₃-C₄, C₃-C₅, C₃-C₆, C₃-C₇, C₃-C₈, C₃-C₉, C₃-C₁₀, C₃-C₁₁, C₃-C₁₂, C₃-C₁₃, C₃-C₁₄, C₃-C₁₅, C₃-C₁₆, C₃-C₁₇, C₃-C₁₈, C₄-C₅, C₄-C₆, C₄-C₇, C₄- C₈, C₄-C₉, C₄-C₁₀, C₄-C₁₁, C₄-C₁₂, C₄-C₁₃, C₄-C₁₄, C₄-C₁₅, C₄-C₁₆, C₄-C₁₇, C₄-C₁₈, C₅-C₆, C₅-C₇, C₅-C₈, C₅-C₉, C₅-C₁₀, C₅-C₁₁, C₅-C₁₂, C₅-C₁₃, C₅-C₁₄, C₅-C₁₅, C₅-C₁₆, C₅-C₁₇, C₅-C₁₈, C₆-C₇, C₆- C₈, C₆-C₉, C₆-C₁₀, C₆-C₁₁, C₆-C₁₂, C₆-C₁₃, C₆-C₁₄, C₆-C₁₅, C₆-C₁₆, C₆-C₁₇, C₆-C₁₈, C₇-C₈, C₇-C₉, C₇-C₁₀, C₇-C₁₁, C₇-C₁₂, C₇-C₁₃, C₇-C₁₄, C₇-C₁₅, C₇-C₁₆, C₇-C₁₇, C₇-C₁₈, C₈-C₉, C₈-C₁₀, C₈-C₁₁, C₈- C₁₂, C₈-C₁₃, C₈-C₁₄, C₈-C₁₅, C₈-C₁₆, C₈-C₁₇, C₈-C₁₈, C₉-C₁₀, C₉-C₁₁, C₉-C₁₂, C₉-C₁₃, C₉-C₁₄, C₉-C₁₅, C₉-C₁₆, C₉-C₁₇, C₉-C₁₈, C₁₀-C₁₁, C₁₀-C₁₂, C₁₀-C₁₃, C₁₀-C₁₄. C₁₀-C₁₅. C₁₀-C₁₆, C₁₀-C₁₇, C₁₀-C₁₈, C₁₁-C₁₂, C₁₁-C₁₃, C₁₁-C₁₄, C₁₁-C₁₅, C₁₁-C₁₆, C₁₁-C₁₇, C₁₁-C₁₈, C₁₂-C₁₃, C₁₂-C₁₄, C₁₂-C₁₅, C₁₂-C₁₆, C₁₂-C₁₇, C₁₂-C₁₈, C₁₃-C₁₄, C₁₃-C₁₅, C₁₃-C₁₆, C₁₃-C₁₇, C₁₃-C₁₈, C₁₄-C₁₅, C₁₄-C₁₆, C₁₄-C₁₇, C₁₄-C₁₈, C₁₅-C₁₆, C₁₅-C₁₇, C₁₅-C₁₈, C₁₆-C₁₇, C₁₆-C₁₈, or C₁₇-C₁₈ chain and the other one is independently a fatty acid with a C₂-C₃, C₂-C₄, C₂-C₅, C₂-C₆, C₂-C₇, C₂-C₈, C₂-C₉, C₂-C₁₀, C₂-C₁₁, C₂-C₁₂, C₂-C₁₃, C₂-C₁₄, C₂-C₁₅, C₂-C₁₆, C₂-C₁₇, C₂-C₁₈, C₃-C₄, C₃-C₅, C₃-C₆, C₃-C₇, C₃-C₈, C₃-C₉, C₃-C₁₀, C₃-C₁₁, C₃-C₁₂, C₃-C₁₃, C₃-C₁₄, C₃-C₁₅, C₃-C₁₆, C₃-C₁₇, C₃-C₁₈, C₄-C₅, C₄-C₆, C₄-C₇, C₄-C₈, C₄- C₉, C₄-C₁₀, C₄-C₁₁, C₄-C₁₂, C₄-C₁₃, C₄-C₁₄, C₄-C₁₅, C₄-C₁₆, C₄-C₁₇, C₄-C₁₈, C₅-C₆, C₅-C₇, C₅-C₈, C₅-C₉, C₅-C₁₀, C₅-C₁₁, C₅-C₁₂, C₅-C₁₃, C₅-C₁₄, C₅-C₁₅, C₅-C₁₆, C₅-C₁₇, C₅-C₁₈, C₆-C₇, C₆-C₈, C₆- C₉, C₆-C₁₀, C₆-C₁₁, C₆-C₁₂, C₆-C₁₃, C₆-C₁₄, C₆-C₁₅, C₆-C₁₆, C₆-C₁₇, C₆-C₁₈, C₇-C₈, C₇-C₉, C₇-C₁₀, C₇-C₁₁, C₇-C₁₂, C₇-C₁₃, C₇-C₁₄, C₇-C₁₅, C₇-C₁₆, C₇-C₁₇, C₇-C₁₈, C₈-C₉, C₈-C₁₀, C₈-C₁₁, C₈-C₁₂, C₈- C₁₃, C₈-C₁₄, C₈-C₁₅, C₈-C₁₆, C₈-C₁₇, C₈-C₁₈, C₉-C₁₀, C₉-C₁₁, C₉-C₁₂, C₉-C₁₃, C₉-C₁₄, C₉-C₁₅, C₉-C₁₆, C₉-C₁₇, C₉-C₁₈, C₁₀-C₁₁, C₁₀-C₁₂, C₁₀-C₁₃, C₁₀-C₁₄. C₁₀-C₁₅. C₁₀-C₁₆, C₁₀-C₁₇, C₁₀-C₁₈, C₁₁-C₁₂, C₁₁-C₁₃, C₁₁-C₁₄, C₁₁-C₁₅, C₁₁-C₁₆, C₁₁-C₁₇, C₁₁-C₁₈, C₁₂-C₁₃, C₁₂-C₁₄, C₁₂-C₁₅, C₁₂-C₁₆, C₁₂-C₁₇, C₁₂-C₁₈, C₁₃-C₁₄, C₁₃-C₁₅, C₁₃-C₁₆, C₁₃-C₁₇, C₁₃-C₁₈, C₁₄-C₁₅, C₁₄-C₁₆, C₁₄-C₁₇, C₁₄-C₁₈, C₁₅-C₁₆, C₁₅-C₁₇, C₁₅-C₁₈, C₁₆-C₁₇, C₁₆-C₁₈, or C₁₇-C₁₈ chain. In some aspects, each fatty acid independently has a chain of 2, 3, 4, 5, 6, 7, 8, 9, 10, 11, 12, 13, 14, 15, 16, 17 or 18 carbon atoms.

[0261] Suitable fatty acids include saturated straight-chain fatty acids, saturated branched fatty acids, unsaturated fatty acids, hydroxy fatty acids, and polycarboxylic acids.

[0262] Examples of useful saturated straight-chain fatty acids include those having an even number of carbon atoms, such as butyric acid (C4), caproic acid (C6), caprylic acid (C8), capric acid (C10), lauric acid (C12), myristic acid (C14), palmitic acid (C16), or stearic acid (C18), and those having an odd number of carbon atoms, such as propionic acid (C3), n-valeric acid (C5), enanthic acid (C7), pelargonic acid (C9), hendecanoic acid (C11), tridecanoic acid (C13), pentadecanoic acid (C15), or heptadecanoic acid (C17).

[0263] Examples of suitable saturated branched fatty acids include isobutyric acid, isocaproic acid, isocaprylic acid, isocapric acid, isolauric acid, 11-methyldodecanoic acid, isomyristic acid, 13-methyl-tetradecanoic acid, isopalmitic acid, 15-methyl-hexadecanoic acid, or isostearic acid. Suitable saturated odd-carbon branched fatty acids include anteiso fatty acids terminating with an isobutyl group, such as 6-methyl-octanoic acid, 8-methyl-decanoic acid, 10-methyl-dodecanoic acid, 12-methyl-tetradecanoic acid, or 14-methyl-hexadecanoic acid.

[0264] Examples of suitable unsaturated fatty acids include 4-decenoic acid, caproleic acid, 4-dodecenoic acid, 5-dodecenoic acid, lauroleic acid, 4-tetradecenoic acid, 5-tetradecenoic acid, 9-tetradecenoic acid, palmitoleic acid, 6-octadecenoic acid, oleic acid, and the like.

[0265] Examples of suitable hydroxy fatty acids include α-hydroxylauric acid, α-hydroxymyristic acid, α-hydroxypalmitic acid, α-hydroxystearic acid, ω-hydroxylauric acid, α-hydroxyarachic acid, 9-hydroxy-12-octadecenoic acid, ricinoleic acid, 9-hydroxy-trans-10,12-octadecadienic acid, 9,10-dihydroxystearic acid, 12-hydroxystearic acid and the like.

[0266] Examples of suitable polycarboxylic acids include oxalic acid, malonic acid, succinic acid, glutaric acid, adipic acid, pimelic acid, suberic acid, azelaic acid, sebacic acid, D,L-malic acid, and the like.

[0267] In some aspects, each fatty acid is independently selected from propionic acid, butyric acid, valeric acid, caproic acid, enanthic acid, caprylic acid, pelargonic acid, capric acid, undecylic acid, lauric acid, tridecylic acid, myristic acid, pentadecylic acid, palmitic acid, margaric acid, or stearic acid.

[0268] In some aspects, each fatty acid is independently selected from α-linolenic acid, stearidonic acid, eicosapentaenoic acid, docosahexaenoic acid, linoleic acid, gamma-linoleic acid, dihomo-gamma-linoleic acid, arachidonic acid, docosatetraenoic acid, palmitoleic acid, vaccenic acid, paullinic acid, oleic acid, elaidic acid, bosseopentaenoic acid, sardine acid, or another monounsaturated or polyunsaturated fatty acid.

[0269] In some aspects, one or both of the fatty acids is an essential fatty acid. In view of the beneficial health effects of certain essential fatty acids, the therapeutic benefits of disclosed therapeutic-loaded exosomes may be increased by including such fatty acids in the therapeutic agent. In some aspects, the essential fatty acid is an n-6 or n-3 essential fatty acid selected from the group consisting of linolenic acid, gamma-linolenic acid, dihomo-gamma-linolenic acid, arachidonic acid, adrenic acid, docosapentaenoic n-6 acid, alpha-linolenic acid, or stearidonic acid.

[0270] Fatty acid chains differ greatly in the length of their chains and may be categorized according to chain length, e.g. as short to very long. Short-chain fatty acids (SCFA) are fatty acids with chains of about five or less carbons (e.g. butyric acid). In some aspects, the fatty acid is a SCFA. Medium-chain fatty acids (MCFA) include fatty acids with chains of about 6-12 carbons, which can form medium-chain triglycerides. In some aspects, the fatty acid is a MCFA. Long-chain fatty acids (LCFA) include fatty acids with chains of 13-21 carbons. In some aspects, the fatty acid is a LCFA. In some aspects, the fatty acid is a LCFA.

### Anchoring Moieties: Phospholipids

[0271] In some aspects, the anchoring moiety [AM] comprises a phospholipid. Phospholipids are a class of lipids that are a major component of all cell membranes. They can form lipid bilayers because of their amphiphilic characteristic. The structure of the phospholipid molecule generally consists of two hydrophobic fatty acid “tails” and a hydrophilic “head” consisting of a phosphate group. For example, a phospholipid can be a lipid according to the following formula:

[chemical structure]

in which Rₚ represents a phospholipid moiety and R₁ and R₂ represent fatty acid moieties with or without unsaturation that may be the same or different.

[0272] A phospholipid moiety may be selected, for example, from the non-limiting group consisting of phosphatidyl choline, phosphatidyl ethanolamine, phosphatidyl glycerol, phosphatidyl serine, phosphatidic acid, 2 lysophosphatidyl choline, and a sphingomyelin.

[0273] Particular phospholipids may facilitate fusion to a lipid bilayer, e.g., the lipid bilayer of an exosomal membrane. For example, a cationic phospholipid may interact with one or more negatively charged phospholipids of a membrane. Fusion of a phospholipid to a membrane may allow one or more elements of a lipid-containing composition to bind to the membrane or to pass through the membrane.

[0274] A fatty acid moiety may be selected, for example, from the non-limiting group consisting of lauric acid, myristic acid, myristoleic acid, palmitic acid, palmitoleic acid, stearic acid, oleic acid, or linoleic acid.

[0275] The phospholipids using as anchoring moieties in the present disclosure can be natural or non-natural phospholipids. Non-natural phospholipid species including natural species with modifications and substitutions including branching, oxidation, cyclization, and alkynes are also contemplated. For example, a phospholipid may be functionalized with or cross-linked to one or more alkynes (e.g., an alkenyl group in which one or more double bonds is replaced with a triple bond). Under appropriate reaction conditions, an alkyne group may undergo a copper-catalyzed cycloaddition upon exposure to an azide.

[0276] Phospholipids include, but are not limited to, glycerophospholipids such as phosphatidylcholines, phosphatidylethanolamines, phosphatidylserines, phosphatidylinositols, phosphatidy glycerols, and phosphatidic acids. Examples of phospholipids that can be used in the anchoring moieties disclosed herein include phosphatidylethanolamines (e.g., dilauroylphosphatidyl ethanolamine, dimyristoylphosphatidyl ethanolamine, dipalmitoylphosphatidyl ethanolamine, distearoylphosphatidyl ethanolamine, dioleoylphosphatidyl ethanolamine, 1-palmitoyl-2-oleylphosphatidyl ethanolamine, 1-oleyl-2-palmitoylphosphatidyl ethanolamine, and dierucoylphosphatidyl ethanolamine), phosphatidyl glycerols (e.g., dilauroylphosphatidyl glycerol, dimyristoylphosphatidyl glycerol, dipalmitoylphosphatidyl glycerol, distearoylphosphatidyl glycerol, dioleoylphosphatidyl glycerol, 1-palmitoyl-2-oleyl-phosphatidyl glycerol, 1-oleyl-2-palmitoyl-phosphatidyl glycerol, and dierucoylphosphatidyl glycerol); phosphatidyl serines (e.g., such as dilauroylphosphatidyl serine, dimyristoylphosphatidyl serine, dipalmitoylphosphatidyl serine, distearoylphosphatidyl serine, dioleoylphosphatidyl serine, 1-palmitoyl-2-oleyl-phosphatidyl serine, 1-oleyl-2-palmitoyl-phosphatidyl serine, and dierucoylphosphatidyl serine); phosphatidic acids (e.g., dilauroylphosphatidic acid, dimyristoylphosphatidic acid, dipalmitoylphosphatidic acid, distearoylphosphatidic acid, dioleoylphosphatidic acid, 1-palmitoyl-2-oleylphosphatidic acid, 1-oleyl-2-palmitoyl-phosphatidic acid, and dierucoylphosphatidic acid); and phosphatidyl inositols (e.g., dilauroylphosphatidyl inositol, dimyristoylphosphatidyl inositol, dipalmitoylphosphatidyl inositol, distearoylphosphatidyl inositol, dioleoylphosphatidyl inositol, 1-palmitoyl-2-oleyl-phosphatidyl inositol, 1-oleyl-2-palmitoyl-phosphatidyl inositol, and dierucoylphosphatidyl inositol.

[0277] Phospholipids may be of a symmetric or an asymmetric type. As used herein, the term “symmetric phospholipid” includes glycerophospholipids having matching fatty acid moieties and sphingolipids in which the variable fatty acid moiety and the hydrocarbon chain of the sphingosine backbone include a comparable number of carbon atoms. As used herein, the term “asymmetric phospholipid” includes lysolipids, glycerophospholipids having different fatty acid moieties (e.g., fatty acid moieties with different numbers of carbon atoms and/or unsaturations (e.g., double bonds)), and sphingolipids in which the variable fatty acid moiety and the hydrocarbon chain of the sphingosine backbone include a dissimilar number of carbon atoms (e.g., the variable fatty acid moiety include at least two more carbon atoms than the hydrocarbon chain or at least two fewer carbon atoms than the hydrocarbon chain).

[0278] In some aspects, the anchoring moiety [AM] comprises phospholipid, e.g., a symmetric phospholipid, with 10 carbons (C₁₀), twelve carbons (C12), fourteen carbons (C14), sixteen carbons (C16) or eighteen carbons (C18). In some aspects, the anchoring moiety [AM] comprises a symmetric phospholipid with fourteen carbons (C14). In some aspects, the anchoring moiety [AM] comprises a symmetric phospholipid with sixteen carbons (C16). In some aspects, the anchoring moiety [AM] comprises a symmetric phospholipid with eighteen carbons (C18). In some aspects, the phospholipid in phosphatidyl ethanolamine (PE). Accordingly, in some aspects, the anchoring moiety [AM] comprises a C14 PE. In some aspects, the anchoring moiety [AM] comprises a C16 PE. In some aspects, the anchoring moiety [AM] comprises a C18 PE. In some aspects, the acyl chains of the PE contain no insaturations. Accordingly, in some aspects, the anchoring moiety [AM] comprises a C14:0 PE, a C16:0 PE, or a C18:0 PE.

[0279] In some aspects, the anchoring moiety [AM] comprises a phospholipid comprising a cyanuric acid (cyanur) group. In some aspects, the phospholipid comprising a cyanuric acid group is a PE. In some aspects, the phospholipid comprising a cyanuric acid group is a C14:0 PE, a C16:0 PE, or a C18:0 PE. In a particular aspect, the phospholipid comprising a cyanuric acid group is a C16:0 Cyanur PE as shown in FIG. 11.

[0280] In some aspects, the anchoring moiety [AM] comprises at least one symmetric phospholipid. Symmetric phospholipids may be selected from the non-limiting group consisting of 1,2 dipropionyl sn-glycero 3 phosphocholine (03:0 PC), 1,2 dibutyryl sn glycero 3 phosphocholine (04:0 PC), 1,2 dipentanoyl sn glycero 3 phosphocholine (05:0 PC), 1,2 dihexanoyl sn glycero 3 phosphocholine (06:0 PC), 1,2 diheptanoyl sn glycero 3 phosphocholine (07:0 PC), 1,2 dioctanoyl sn glycero 3 phosphocholine (08:0 PC), 1,2 dinonanoyl sn glycero 3 phosphocholine (09:0 PC), 1,2 didecanoyl sn glycero 3 phosphocholine (10:0 PC), 1,2 diundecanoyl sn glycero 3 phosphocholine (11:0 PC, DUPC), 1,2 dilauroyl sn glycero 3 phosphocholine (12:0 PC), 1,2 ditridecanoyl sn glycero 3 phosphocholine (13:0 PC), 1,2 dimyristoyl sn glycero 3 phosphocholine (14:0 PC, DMPC), 1,2 dipentadecanoyl sn glycero 3 phosphocholine (15:0 PC), 1,2 dipalmitoyl sn glycero 3 phosphocholine (16:0 PC, DPPC), 1,2 diphytanoyl sn glycero 3 phosphocholine (4ME 16:0 PC), 1,2 diheptadecanoyl sn glycero 3 phosphocholine (17:0 PC), 1,2 distearoyl sn glycero 3 phosphocholine (18:0 PC, DSPC), 1,2 dimyristelaidoyl sn glycero 3 phosphocholine (14:1 (Δ9-Trans) PC), 1,2 dipalmitoleoyl sn glycero 3 phosphocholine (16:1 (Δ9-Cis) PC), 1,2 dipalmitelaidoyl sn glycero 3 phosphocholine (16:1 (Δ9-Trans) PC), 1,2 dipetroselenoyl sn glycero 3 phosphocholine (18:1 (Δ6-Cis) PC), 1,2 dioleoyl sn glycero 3 phosphocholine (18:1 (Δ9-Cis) PC, DOPC), 1,2 dielaidoyl sn glycero 3 phosphocholine (18:1 (Δ9-Trans) PC), 1,2 dilinoleoyl sn glycero 3 phosphocholine (18:2 (Cis) PC, DLPC), 1,2 dilinolenoyl sn glycero 3 phosphocholine (18:3 (Cis) PC, DLnPC), 1,2 dihexanoyl sn glycero 3 phosphoethanolamine (06:0 PE), 1,2 dioctanoyl sn glycero 3 phosphoethanolamine (08:0 PE), 1,2 didecanoyl sn glycero 3 phosphoethanolamine (10:0 PE), 1,2 dilauroyl sn glycero 3 phosphoethanolamine (12:0 PE), 1,2 dimyristoyl sn glycero 3 phosphoethanolamine (14:0 PE), 1,2 dipentadecanoyl sn glycero 3 phosphoethanolamine (15:0 PE), 1,2 dipalmitoyl sn glycero 3 phosphoethanolamine (16:0 PE), 1,2 diphytanoyl sn glycero 3 phosphoethanolamine (4ME 16:0 PE), 1,2 diheptadecanoyl sn glycero 3 phosphoethanolamine (17:0 PE), 1,2 distearoyl sn glycero 3 phosphoethanolamine (18:0 PE, DSPE), 1,2 dipalmitoleoyl sn glycero 3 phosphoethanolamine (16:1 PE), 1,2 dioleoyl sn glycero 3 phosphoethanolamine (18:1 (Δ9-Cis) PE, DOPE), 1,2 dielaidoyl sn glycero 3 phosphoethanolamine (18:1 (Δ9-Trans) PE), 1,2 dilinoleoyl sn glycero 3 phosphoethanolamine (18:2 PE, DLPE), 1,2 dilinolenoyl sn glycero 3 phosphoethanolamine (18:3 PE, DLnPE), 1,2 di O octadecenyl sn glycero 3 phosphocholine (18:0 Diether PC), 1,2 dioleoyl sn glycero 3 phospho rac (1 glycerol) sodium salt (DOPG), and any combination thereof.

[0281] In some aspects, the anchoring moiety [AM] comprises at least one symmetric phospholipid selected from the non-limiting group consisting of DLPC, DMPC, DOPC, DPPC, DSPC, DUPC, 18:0 Diether PC, DLnPC, DAPC, DHAPC, DOPE, 4ME 16:0 PE, DSPE, DLPE, DLnPE, DAPE, DHAPE, DOPG, and any combination thereof.

[0282] In some aspects, the anchoring moiety [AM] comprises at least one asymmetric phospholipid. Asymmetric phospholipids may be selected from the non-limiting group consisting of 1 myristoyl 2 palmitoyl sn glycero 3 phosphocholine (14:0-16:0 PC, MPPC), 1 myristoyl 2 stearoyl sn glycero 3 phosphocholine (14:0-18:0 PC, MSPC), 1 palmitoyl 2 acetyl sn glycero 3 phosphocholine (16:0-02:0 PC), 1 palmitoyl 2 myristoyl sn glycero 3 phosphocholine (16:0-14:0 PC, PMPC), 1 palmitoyl 2 stearoyl sn glycero 3 phosphocholine (16:0-18:0 PC, PSPC), 1 palmitoyl 2 oleoyl sn glycero 3 phosphocholine (16:0-18:1 PC, POPC), 1 palmitoyl 2 linoleoyl sn glycero 3 phosphocholine (16:0-18:2 PC, PLPC), 1 palmitoyl 2 arachidonoyl sn glycero 3 phosphocholine (16:0-20:4 PC), 1 palmitoyl 2 docosahexaenoyl sn glycero 3 phosphocholine (14:0-22:6 PC), 1 stearoyl 2 myristoyl sn glycero 3 phosphocholine (18:0-14:0 PC, SMPC), 1 stearoyl 2 palmitoyl sn glycero 3 phosphocholine (18:0-16:0 PC, SPPC), 1 stearoyl 2 oleoyl sn glycero 3 phosphocholine (18:0-18:1 PC, SOPC), 1 stearoyl 2 linoleoyl sn glycero 3 phosphocholine (18:0-18:2 PC), 1 stearoyl 2 arachidonoyl sn glycero 3 phosphocholine (18:0-20:4 PC), 1 stearoyl 2 docosahexaenoyl sn glycero 3 phosphocholine (18:0-22:6 PC), 1 oleoyl 2 myristoyl sn glycero 3 phosphocholine (18:1-14:0 PC, OMPC), 1 oleoyl 2 palmitoyl sn glycero 3 phosphocholine (18:1-16:0 PC, OPPC), 1 oleoyl 2 stearoyl sn glycero 3 phosphocholine (18:1-18:0 PC, OSPC), 1 palmitoyl 2 oleoyl sn glycero 3 phosphoethanolamine (16:0-18:1 PE, POPE), 1 palmitoyl 2 linoleoyl sn glycero 3 phosphoethanolamine (16:0-18:2 PE), 1 palmitoyl 2 arachidonoyl sn glycero 3 phosphoethanolamine (16:0-20:4 PE), 1 palmitoyl 2 docosahexaenoyl sn glycero 3 phosphoethanolamine (16:0-22:6 PE), 1 stearoyl 2 oleoyl sn glycero 3 phosphoethanolamine (18:0-18:1 PE), 1 stearoyl 2 linoleoyl sn glycero 3 phosphoethanolamine (18:0-18:2 PE), 1 stearoyl 2 arachidonoyl sn glycero 3 phosphoethanolamine (18:0-20:4 PE), 1 stearoyl 2 docosahexaenoyl sn glycero 3 phosphoethanolamine (18:0-22:6 PE), 1 oleoyl 2 cholesterylhemisuccinoyl sn glycero 3 phosphocholine (OChemsPC), and any combination thereof.

[0283] To provide more remarkable nuclease resistance, cellular uptake efficiency, and a more remarkable RNA interference effect, phosphatidylethanolamines may be used as anchoring moieties, for example, dimyristoylphosphatidyl ethanolamine, dipalmitoylphosphatidyl ethanolamine, 1-palmitoyl-2-oleyl-phosphatidyl ethanolamine, and dioleoylphosphatidyl ethanolamine.

### Anchoring Moieties: Lysolipids (e.g., Lysophospholipids)

[0284] In some aspects, the anchoring moiety [AM] comprises a lysolipid, e.g., a lysophospholipid. Lysolipids are derivatives of a lipid in which one or both fatty acyl chains have been removed, generally by hydrolysis. Lysophospholipids are derivatives of a phospholipid in which one or both fatty acyl chains have been removed by hydrolysis.

[0285] In some aspects, the anchoring moiety comprises any of the phospholipids disclosed above, in which one or both acyl chains have been removed via hydrolysis, and therefore the resulting lysophospholipid comprises one or no fatty acid acyl chain.

[0286] In some aspects, the anchoring moiety comprises a lysoglycerophospholipid, a lysoglycosphingoliopid, a lysophosphatidylcholine, a lysophosphatidylethanolamine, a lysophosphatidylinositol, or a lysophosphatidylserine.

[0287] In some aspect, the anchoring moiety [AM] comprises a lysolipid selected from the non-limiting group consisting of 1 hexanoyl 2 hydroxy sn glycero 3 phosphocholine (06:0 Lyso PC), 1 heptanoyl 2 hydroxy sn glycero 3 phosphocholine (07:0 Lyso PC), 1 octanoyl 2 hydroxy sn glycero 3 phosphocholine (08:0 Lyso PC), 1 nonanoyl 2 hydroxy sn glycero 3 phosphocholine (09:0 Lyso PC), 1 decanoyl 2 hydroxy sn glycero 3 phosphocholine (10:0 Lyso PC), 1 undecanoyl 2 hydroxy sn glycero 3 phosphocholine (11:0 Lyso PC), 1 lauroyl 2 hydroxy sn glycero 3 phosphocholine (12:0 Lyso PC), 1 tridecanoyl 2 hydroxy sn glycero 3 phosphocholine (13:0 Lyso PC), 1 myristoyl 2 hydroxy sn glycero 3 phosphocholine (14:0 Lyso PC), 1 pentadecanoyl 2 hydroxy sn glycero 3 phosphocholine (15:0 Lyso PC), 1 palmitoyl 2 hydroxy sn glycero 3 phosphocholine (16:0 Lyso PC), 1 heptadecanoyl 2 hydroxy sn glycero 3 phosphocholine (17:0 Lyso PC), 1 stearoyl 2 hydroxy sn glycero 3 phosphocholine (18:0 Lyso PC), or 1 oleoyl 2 hydroxy sn glycero 3 phosphocholine (18:1 Lyso PC), 1 myristoyl 2 hydroxy sn glycero 3 phosphoethanolamine (14:0 Lyso PE), 1 palmitoyl 2 hydroxy sn glycero 3 phosphoethanolamine (16:0 Lyso PE), 1 stearoyl 2 hydroxy sn glycero 3 phosphoethanolamine (18:0 Lyso PE), 1 oleoyl 2 hydroxy sn glycero 3 phosphoethanolamine (18:1 Lyso PE), 1 hexadecyl sn glycero 3 phosphocholine (C16 Lyso PC), and any combination thereof.

### Anchoring Moieties: Vitamins

[0288] In some aspects, the anchoring moiety [AM] comprises a lipophilic vitamin, e.g., vitamin A, vitamin E, vitamin K, vitamin D, folic acid, vitamin B2 (riboflavin), vitamin B3 (niacin), or vitamin B6 (pyridoxine).

[0289] In some aspects, the anchoring moiety [AM] comprises or consists of vitamin D. Vitamin D is a group of fat-soluble secosteroids responsible for increasing intestinal absorption of calcium, magnesium, and phosphate, and many other biological effects In humans, the most important compounds in this group are vitamin D3 (also known as cholecalciferol) and vitamin D₂ (ergocalciferol).

[chemical structure]

[0290] In some aspects, the anchoring moiety [AM] comprises or consists of vitamin B9 (folic acid).

[chemical structure]

[0291] In some aspects, the anchoring moiety [AM] comprises or consists of vitamin B₂ (riboflavin).

[chemical structure]

[0292] In some aspects, the anchoring moiety [AM] comprises or consists of vitamin B₃ (niacin)

[chemical structure]

[0293] In some aspects, the anchoring moiety [AM] comprises or consists of vitamin B₆ (pyridoxine).

[chemical structure]

[0294] In some aspects, the anchoring moiety [AM] comprises or consists of vitamin A. Vitamin A is a group of unsaturated nutritional organic compounds that includes retinol, retinal, retinoic acid, and several provitamin A carotenoids (most notably beta-carotene). In some aspects, the anchoring moiety comprises retinol. In some aspects, the anchoring moiety comprises a retinoid. Retinoids are a class of chemical compounds that are vitamers of vitamin A or are chemically related to it. In some aspects, the anchoring moiety comprises a first generation retinoid (e.g., retinol, tretinoin, isotreatinoin, or alitretinoin), a second-generation retinoid (e.g., etretinate or acitretin), a third-generation retinoid (e.g., adapalene, bexarotene, or tazarotene), or any combination thereof.

First-generation retinoids

[chemical structure]

[chemical structure]

[chemical structure]

[chemical structure]

Second-generation retinoids

[chemical structure]

[chemical structure]

Third-generation retinoids

[chemical structure]

[chemical structure]

[chemical structure]

[0295] In some aspects, the anchoring moiety [AM] comprises or consists of vitamin E. Tocopherols are a class of methylated phenols many of which have vitamin E activity. Thus, in some aspects, the anchoring moiety comprises alpha-tocopherol, beta-tocopherol, gamma-tocopherol, delta-tocopherol, or a combination thereof.

[chemical structure]

[0296] Tocotrienols also have vitamin E activity. The critical chemical structural difference between tocotrienols and tocopherols is that tocotrienols have unsaturated isoprenoid side chain with three carbon-carbon double bonds versus saturated side chains for tocopherols. In some aspects, the anchoring moiety comprises alpha-tocotrienol, beta-tocotrienol, gamma-tocotrienol, delta-tocotrienol, or a combination thereof. Tocotrienols can be represented by the formula below

[chemical structure]

[0297] alpha(α)-Tocotrienol: R1=Me, R2=Me, R3=Me;
[0298] beta(β)-Tocotrienol: R1=Me, R2=H, R3=Me;
[0299] gamma(γ)-Tocotrienol: R1=H, R2=Me, R3=Me;
[0300] delta(δ)-Tocotrienol: R1=H, R2=H, R3=Me.

[0301] In some aspects, the anchoring moiety [AM] comprises or consists of vitamin K. Chemically, the vitamin K family comprises 2-methyl-1.4-naphthoquinone (3-) derivatives. Vitamin K includes two natural vitamers: vitamin K₁ and vitamin K₂. The structure of vitamin K₁ (also known as phytonadione, phylloquinone, or (E)-phytonadione) is marked by the presence of a phytyl group. The structures of vitamin K₂ (menaquinones) are marked by the polyisoprenyl side chain present in the molecule that can contain six to 13 isoprenyl units. Thus, vitamin K2 consists of a number of related chemical subtypes, with differing lengths of carbon side chains made of isoprenoid groups of atoms. MK-4 is the most common form of vitamin K₂. Long chain forms, such as MK-7, MK-8 and MK-9 are predominant in fermented foods. Longer chain forms of vitamin K₂ such as MK-10 to MK-13 are synthesized by bacteria, but they are not well absorbed and have little biological function. In addition to the natural forms of vitamin K, there is a number of synthetic forms of vitamin K such as vitamin K₃ (menadione; 2-methylnaphthalene-1,4-dione), vitamin K₄, and vitamin K₅.

[0302] Accordingly, in some aspects, the anchoring moiety comprises vitamin K₁, K₂ (e.g., MK-4, MK-5, MK-6, MK-7, MK-8, MK-9, MK-10, MK-11, MK-12, or MK-13), K₃, K₄, K₅, or any combination thereof.

[chemical structure]

[0303] Chemically, the vitamin K family comprises 2-methyl-1,4-naphthoquinone (3-) derivatives. Vitamin K includes two natural vitamers: vitamin K₁ (phylloquinone) and vitamin K₂ (menaquinone). Vitamin K₂, in turn, consists of a number of related chemical subtypes, with differing lengths of carbon side chains made of isoprenoid groups of atoms. The two most studied ones are menaquinone-4 (MK-4) and menaquinone-7 (MK-7). Thus, in some aspects, the vitamin K is MK-4, MK-5, or a combination thereof.

### Scaffold Moieties

[0304] In some aspects, the anchoring moiety [AM] comprise a scaffolding moiety, e.g., a Scaffold X protein (e.g., PTGFR or a fragment disclosed), that can be inserted in the membrane of the EV (e.g., exosome), or a molecule capable of interacting via affinity (e.g., an antibody or binding portion thereof) with a scaffold moiety, e.g., a Scaffold X protein (e.g., PTGFR or a fragment disclosed), present in the membrane of the EV (e.g., exosome) natively or recombinantly expressed. In some aspects, one or more scaffold moieties can be CD47, CD55, CD49, CD40, CD133, CD59, glypican-1, CD9, CD63, CD81, integrins, selectins, lectins, cadherins, other similar polypeptides known to those of skill in the art, or any combination thereof. Non-limiting examples of other scaffold moieties that can be used with the present disclosure include: aminopeptidase N (CD13); Neprilysin, AKA membrane metalloendopeptidase (MME); ectonucleotide pyrophosphatase/phosphodiesterase family member 1 (ENPP1); Neuropilin-1 (NRP1); or any combination thereof.

[0305] In other aspects, one or more scaffold moieties are expressed in the membrane of the EVs (e.g., exosomes) by recombinantly expressing the scaffold moieties in the producer cells. The EVs (e.g., exosomes) obtained from the producer cells can be further modified to be conjugated to a maleimide moiety or to a linker. In other aspects, the scaffold moiety, e.g., Scaffold X, is deglycosylated. In some aspects, the scaffold moiety, e.g., Scaffold X, is highly glycosylated, e.g., higher than naturally-occurring Scaffold X under the same condition.

### Scaffold Moieties: Scaffold X

[0306] In some aspects, the anchoring moiety [AM] can comprise a scaffold moiety disclosed herein, e.g., Scaffold X, e.g., PTGFRN, BSG, IGSF2, IGSF3, IGSF8, ITGB1, ITGA4, SLC3A2, ATP transporter, or a fragment or a variant thereof. In other aspects, the anchoring moiety [AM] can comprise a ligand (e.g., an antibody or binding portion thereof) than can specifically bind to a scaffold moiety disclosed herein, e.g., Scaffold X, e.g., PTGFRN, BSG, IGSF2, IGSF3, IGSF8, ITGB1, ITGA4, SLC3A2, ATP transporter, or a fragment or a variant thereof.

[0307] In some aspects, surface (e.g., Scaffold X)-engineered EVs (e.g., exosomes), i.e., EVs overexpressing a scaffold protein (e.g., PTGFRN) demonstrate superior characteristics compared to natives EVs (e.g., exosomes) not overexpressing the scaffold protein (e.g., PTGFRN). For example, surface (e.g., Scaffold X)-engineered EVs (e.g., exosomes) can contain more scaffold proteins on their external surface than naturally occurring EVs (e.g., exosomes). Accordingly, surface (e.g., Scaffold X)-engineered EVs (e.g., exosomes) can have greater, more specific, or more controlled biological activity compared to naturally occurring EVs (e.g., exosomes).

[0308] In some aspects, the Scaffold X comprises Prostaglandin F2 receptor negative regulator (the PTGFRN polypeptide). The PTGFRN polypeptide can be also referred to as CD9 partner 1 (CD9P-1), Glu-Trp-Ile EWI motif-containing protein F (EWI-F), Prostaglandin F2-alpha receptor regulatory protein, Prostaglandin F2-alpha receptor-associated protein, or CD315.

[0309] Non-limiting examples of other Scaffold X proteins can be found at U.S. Pat. No. 10,195,290B1, issued Feb. 5, 2019, which is incorporated by reference in its entirety.

### Linkages and Spacers

[0310] The optimized linkers of the present disclosure comprise combinations of linkages, e.g., cleavable or non-cleavable bonds (e.g., phosphodiester or phosphorothioate bonds, respectively) and cleavable or non-cleavable linkers, and spacers. The main function of a combination of linkages and spacers is to provide the optimal spacing between the anchoring moiety or moieties [AM] and the biologically active molecule or molecules [BAM]. For example, in the case of an ASO, a goal of a combination of linker and spacers it to reduce steric hindrances and position the ASO so it can interact with a target nucleic acid, e.g., a mRNA or a miRNA. Other goals are to increase the loading efficiency of the EV (e.g., an exosome), increase the number of BAM per EV, increase the surface density of BAM on the EV, increase the potency of the BAM after incorporate to the EV, or any combination thereof. In the context of the present disclosure the term “linker combination” refers to the combination of linkages and spacer that constitutes an optimizer liker disclosed herein.

[0311] Some linkers may be susceptible to cleavage (“cleavable linker”) thereby facilitating release of the biologically active molecule [BAM]. Thus, in some aspects, a linker combination disclosed herein can comprise a cleavable linker. Such cleavable linkers may be susceptible, for example, to acid-induced cleavage, photo-induced cleavage, peptidase-induced cleavage, esterase-induced cleavage, and disulfide bond cleavage, at conditions under which the biologically active molecule remains active. Alternatively, linkers may be substantially resistant to cleavage (“non-cleavable linker”). In some aspects, the cleavable linker comprises a spacer. In some aspects the spacer is PEG.

[0312] In some aspects, a linker combination comprises at least 2, at least 3, at least 4, at least 5, or at least 6 or more different linkers disclosed herein. In some aspects, linkers in a linker combination can be linked by an ester bond (e.g., phosphodiester or phosphorothioate ester).

[0313] In some aspects, the linker is direct bond between an anchoring moiety [AM] and a biologically active molecule [BAM], e.g., an ASO.

### Non-Cleavable Linkers

[0314] In some aspects, the linker combination comprises a “non-cleavable liker.” Non-cleavable linkers are any chemical moiety capable of linking two or more components of a construct disclosed herein, e.g., a construct of Formula 1. E.g., the non-cleavable linker can link a anchoring moiety [AM] and a spacer [SP], a first spacer [SP] to a second spacer [SP], or a spacer [SP] to a biologically active molecule [BAM]. Non-cleavable linkers are substantially resistant to acid-induced cleavage, photo-induced cleavage, peptidase-induced cleavage, esterase-induced cleavage and disulfide bond cleavage.

[0315] Furthermore, non-cleavable refers to the ability of the chemical bond in the linker or adjoining to the linker to withstand cleavage induced by an acid, photolabile-cleaving agent, a peptidase, an esterase, or a chemical or physiological compound that cleaves a disulfide bond, at conditions under which a cyclic dinucleotide and/or the antibody does not lose its activity.

[0316] In some aspects, the linker combination comprises a non-cleavable linker comprising, e.g., tetraethylene glycol (TEG), hexaethylene glycol (HEG), polyethylene glycol (PEG), succinimide, or any combination thereof. In some aspects, the non-cleavable linker comprises a spacer unit to link the biologically active molecule to the non-cleavable linker.

[0317] In some aspects, one or more non-cleavable linkers comprise smaller units (e.g., HEG, TEG, glycerol, C2 to C12 alkyl, and the like) linked together. In one aspect, the linkage is an ester linkage (e.g., phosphodiester or phosphorothioate ester) or other linkage.

### Non-Cleavable Linkers/Spacers: Ethylene Glycols (HEG, TEG, PEG)

[0318] In some aspects, the linker combination comprises a non-cleavable linker, wherein the non-cleavable linker comprises a polyethylene glycol (PEG) characterized by a formula R³—(O—CH₂—CH₂)ₙ— or R³—(0-CH₂—CH₂)ₙ—O— with R3 being hydrogen, methyl or ethyl and n having a value from 2 to 200. In some aspects, the linker comprises a spacer, wherein the spacer is PEG.

[0319] In some aspects, the PEG linker is an oligo-ethylene glycol, e.g., diethylene glycol, triethylene glycol, tetra ethylene glycol (TEG), pentaethylene glycol, or a hexaethylene glycol (HEG) linker.

[0320] In some aspects, n has a value of 2, 3, 4, 5, 6, 7, 8, 9, 10, 11, 12, 13, 14, 15. In some aspects, n is between 2 and 10, between 10 and 15. In some specific aspects, n has a value from 2 to 5, from 5 to 10, or from 10 to 15. In some aspects, the PEG is a branched PEG. Branched PEGs have three to ten PEG chains emanating from a central core group.

[0321] In certain aspects, the PEG moiety is a monodisperse polyethylene glycol. In the context of the present disclosure, a monodisperse polyethylene glycol (mdPEG) is a PEG that has a single, defined chain length and molecular weight. mdPEGs are typically generated by separation from the polymerization mixture by chromatography. In certain formulae, a monodisperse PEG moiety is assigned the abbreviation mdPEG.

[0322] In some aspects, the PEG is a Star PEG. Star PEGs have 10 to 15 PEG chains emanating from a central core group. In some aspects, the PEG is a Comb PEGs. Comb PEGs have multiple PEG chains normally grafted onto a polymer backbone.

[0323] In some aspects, a linker combination of the present disclosure can comprise several PEG linkers, e.g., a cleavable linker flanked by PEG, HEG, or TEG linkers. In some aspects, the linker combination comprises more than one (HEG) and/or (TEG) units, wherein each unit is connected, e.g., via a phosphate ester linker, a phosphorothioate ester linkage, or a combination thereof, and wherein the total number of carbon units in the linker is C15 or less.

### Non-Cleavable Linkers/Spacers: Glycerol and Polyglycerols (PG)

[0324] In some aspects, the linker combination comprises a non-cleavable linker comprising a glycerol unit or a polyglycerol (PG) described by the formula ((R₃—O—(CH₂—CHOH—CH₂O)ₙ—) with R3 being hydrogen, methyl or ethyl, and n having a value from 1 to 15. In some aspects, n has a value from 1 to 5. In some aspects, n has a value from 5 to 10. In some aspects, n has a value from 10 to 15.

[0325] In some aspects, the PG linker is a diglycerol, triglycerol, tetraglycerol (TG), pentaglycerol, or a hexaglycerol (HG) linker. In some aspects, n has a value of 2, 3, 4, 5, 6, 7, 8, 9, 10, 11, 12, 13, 14, or 15. In some aspects, n is between 2 and 5, between 5 and 10, or between 10 and 15.

[0326] In some alternatives of these aspects, n has a value from 1 to 15. In some aspects, the heterologous moiety is a branched polyglycerol described by the formula (R³—O—(CH₂—CHOR⁵—CH₂—O)ₙ—) with R⁵ being hydrogen or a linear glycerol chain described by the formula (R³—O—(CH₂—CHOH—CH₂—O)ₙ—) and R³ being hydrogen, methyl or ethyl. In some aspects, the heterologous moiety is a hyperbranched polyglycerol described by the formula (R³—O—(CH₂—CHOR⁵—CH₂—O)ₙ—) with R⁵ being hydrogen or a glycerol chain described by the formula (R³—O—(CH₂—CHOR⁶—CH₂—O)ₙ—), with R⁷ being hydrogen or a glycerol chain described by the formula (R³—O—(CH₂—CHOR⁷—CH₂—O)ₙ—), with R⁷ being hydrogen or a linear glycerol chain described by the formula (R³—O—(CH₂—CHOH—CH₂—O)ₙ—) and R³ being hydrogen, methyl or ethyl. Hyperbranched glycerol and methods for its synthesis are described in Oudshorn et al. (2006) Biomaterials 27:5471-5479; Wilms et al. (20100 Acc. Chem. Res. 43, 129-41, and references cited therein.

[0327] In some aspects, the linker combination comprises more than one (glycerol), and/or (HG) and/or (TG) units wherein and each unit is connected, e.g., via a phosphate ester linker, a phosphorothioate ester linkage, or a combination thereof, and wherein the total number of carbon units in the linker is C₁₅ or less.

### Non-Cleavable Linkers: Aliphatic (Alkyl) Linkers

[0328] In some aspects, the linker combination comprises at least one aliphatic (alkyl) linker, e.g., propyl, butyl, hexyl, or C2-C15 alkyl, such as C2-C10 alkyl or C2-C₆ alkyl.

[0329] In some aspects, the linker combination comprises an alkyl chain, e.g., an unsubstituted alkyl. In some aspects, the linker combination comprises an substituted or unsubstituted alkenyl, substituted or unsubstituted alkynyl, arylalkyl, arylalkenyl, arylalkynyl, heteroarylalkyl, heteroarylalkenyl, heteroarylalkynyl, heterocyclylalkyl, heterocyclylalkenyl, heterocyclylalkynyl, aryl, heteroaryl, heterocyclyl, cycloalkyl, cycloalkenyl, alkylarylalkyl, alkylarylalkenyl, alkylarylalkynyl, alkenylarylalkyl, alkenylarylalkenyl, alkenylarylalkynyl, alkynylarylalkyl, alkynylarylalkenyl, alkynylarylalkynyl, alkylheteroarylalkyl, alkylheteroarylalkyl, alkylheteroarylalkenyl, alkylheteroarylalkynyl, alkenylheteroarylalkyl, alkenylheteroarylalkenyl, alkenylheteroarylalkynyl, alkynylheteroarylalkyl, alkynylheteroarylalkenyl, alkynylheteroarylalkynyl, alkylheterocyclylalkyl, alkylheterocyclylalkenyl, alkylheterocyclylalkynyl, alkenylheterocyclylalkyl, alkenylheterocyclylalkenyl, or alkenylheterocyclylalkynyl.

[0330] Optionally these components are substituted. Substituents include alcohol, alkoxy (such as methoxy, ethoxy, and propoxy), straight or branched chain alkyl (such as C1-C15 alkyl), amine, aminoalkyl (such as amino C1-C15 alkyl), phosphoramidite, phosphate, phosphoramidate, phosphorodithioate, thiophosphate, hydrazide, hydrazine, halogen, (such as F, Cl, Br, or I), amide, alkylamide (such as amide C1-C15 alkyl), carboxylic acid, carboxylic ester, carboxylic anhydride, carboxylic acid halide, ether, sulfonyl halide, imidate ester, isocyanate, isothiocyanate, haloformate, carboduimide adduct, aldehydes, ketone, sulfhydryl, haloacetyl, alkyl halide, alkyl sulfonate, C(═O)CH═CHC(═O) (maleimide), thioether, cyano, sugar (such as mannose, galactose, and glucose), α,β-unsaturated carbonyl, alkyl mercurial, or α,β-unsaturated sulfone.

[0331] The term “alkyl,” by itself or as part of another substituent, means, unless otherwise stated, a straight or branched chain hydrocarbon radical having the number of carbon atoms designated (e.g., C₁-C₁₀ means one to ten carbon atoms). Typically, an alkyl group will have from 1 to 15 carbon atoms, for example having from 1 to 10 carbon atoms, from 1 to 8 carbon atoms or from 1 to 6 carbon atoms. A “lower alkyl” group is an alkyl group having from 1 to 4 carbon atoms. The term “alkyl” includes di- and multivalent radicals. For example, the term “alkyl” includes “alkylene” wherever appropriate, e.g., when the formula indicates that the alkyl group is divalent or when substituents are joined to form a ring. Examples of alkyl radicals include, but are not limited to, methyl, ethyl, n-propyl, iso-propyl, n-butyl, tert-butyl, iso-butyl, sec-butyl, as well as homologs and isomers of, for example, n-pentyl, n-hexyl, n-heptyl and n-octyl.

[0332] The term “alkylene” by itself or as part of another substituent means a divalent (diradical) alkyl group, wherein alkyl is defined herein. “Alkylene” is exemplified, but not limited, by —CH₂CH₂CH₂CH₂—. Typically, an “alkylene” group will have from 1 to 15 carbon atoms, for example, having 10 or fewer carbon atoms (e.g., 1 to 8 or 1 to 6 carbon atoms). A “lower alkylene” group is an alkylene group having from 1 to 4 carbon atoms.

[0333] The term “alkenyl” by itself or as part of another substituent refers to a straight or branched chain hydrocarbon radical having from 2 to 15 carbon atoms and at least one double bond. A typical alkenyl group has from 2 to 10 carbon atoms and at least one double bond. In one aspect, alkenyl groups have from 2 to 8 carbon atoms or from 2 to 6 carbon atoms and from 1 to 3 double bonds. Exemplary alkenyl groups include vinyl, 2-propenyl, 1-but-3-enyl, crotyl, 2-(butadienyl), 2,4-pentadienyl, 3-(1,4-pentadienyl), 2-isopentenyl, 1-pent-3-enyl, 1-hex-5-enyl and the like.

[0334] The term “alkynyl” by itself or as part of another substituent refers to a straight or branched chain, unsaturated or polyunsaturated hydrocarbon radical having from 2 to 15 carbon atoms and at least one triple bond. A typical “alkynyl” group has from 2 to 10 carbon atoms and at least one triple bond. In one aspect of the disclosure, alkynyl groups have from 2 to 6 carbon atoms and at least one triple bond. Exemplary alkynyl groups include prop-1-ynyl, prop-2-ynyl (i.e., propargyl), ethynyl and 3-butynyl.

[0335] The terms “alkoxy,” “alkylamino” and “alkylthio” (or thioalkoxy) are used in their conventional sense, and refer to alkyl groups that are attached to the remainder of the molecule via an oxygen atom, an amino group, or a sulfur atom, respectively.

[0336] The term “heteroalkyl,” by itself or in combination with another term, means a stable, straight or branched chain hydrocarbon radical consisting of the stated number of carbon atoms (e.g., C₂-C₁₀, or C₂-C₈) and at least one heteroatom chosen, e.g., from N, O, S, Si, B and P (in one aspect, N, O and S), wherein the nitrogen, sulfur and phosphorus atoms are optionally oxidized, and the nitrogen atom(s) are optionally quaternized. The heteroatom(s) is/are placed at any interior position of the heteroalkyl group. Examples of heteroalkyl groups include, but are not limited to, —CH₂—CH₂—O—CH₃, —CH₂—CH₂—NH—CH₃, —CH₂—CH₂—N(CH₃)—CH₃, —CH₂—S—CH₂—CH₃, —CH₂—CH₂—S(O)—CH₃, —CH₂—CH₂—S(O)₂—CH₃, —CH—CH—O—CH₃, —CH₂—Si(CH₃)₃, —CH₂—CH═N—OCH₃, and —CH═CH—N(CH₃)—CH₃. Up to two heteroatoms can be consecutive, such as, for example, —CH₂—NH—OCH₃ and —CH₂—O—Si(CH₃)₃.

[0337] Similarly, the term “heteroalkylene” by itself or as part of another substituent means a divalent radical derived from heteroalkyl, as exemplified, but not limited by, —CH₂—CH₂—S—CH₂—CH₂— and —CH₂—S—CH₂—CH₂—NH—CH₂—. Typically, a heteroalkyl group will have from 3 to 24 atoms (carbon and heteroatoms, excluding hydrogen) (3- to 24-membered heteroalkyl). In another example, the heteroalkyl group has a total of 3 to 10 atoms (3- to 10-membered heteroalkyl) or from 3 to 8 atoms (3- to 8-membered heteroalkyl). The term “heteroalkyl” includes “heteroalkylene” wherever appropriate, e.g., when the formula indicates that the heteroalkyl group is divalent or when substituents are joined to form a ring.

[0338] The term “cycloalkyl” by itself or in combination with other terms, represents a saturated or unsaturated, non-aromatic carbocyclic radical having from 3 to 24 carbon atoms, for example, having from 3 to 12 carbon atoms (e.g., C₃-C₈ cycloalkyl or C₃-C₆ cycloalkyl). Examples of cycloalkyl include, but are not limited to, cyclopropyl, cyclobutyl, cyclopentyl, cyclohexyl, cycloheptyl, 1-cyclohexenyl, 3-cyclohexenyl, cycloheptyl and the like. The term “cycloalkyl” also includes bridged, polycyclic (e.g., bicyclic) structures, such as norbornyl, adamantyl and bicyclo[2.2.1]heptyl. The “cycloalkyl” group can be fused to at least one (e.g., 1 to 3) other ring selected from aryl (e.g., phenyl), heteroaryl (e.g., pyridyl) and non-aromatic (e.g., carbocyclic or heterocyclic) rings. When the “cycloalkyl” group includes a fused aryl, heteroaryl or heterocyclic ring, then the “cycloalkyl” group is attached to the remainder of the molecule via the carbocyclic ring.

[0339] The term “heterocycloalkyl,” “heterocyclic,” “heterocycle,” or “heterocyclyl,” by itself or in combination with other terms, represents a carbocyclic, non-aromatic ring (e.g., 3- to 8-membered ring and for example, 4-, 5-, 6- or 7-membered ring) containing at least one and up to 5 heteroatoms selected from, e.g., N, O, S, Si, B and P (for example, N, O and S), wherein the nitrogen, sulfur and phosphorus atoms are optionally oxidized, and the nitrogen atom(s) are optionally quaternized (e.g., from 1 to 4 heteroatoms selected from nitrogen, oxygen and sulfur), or a fused ring system of 4- to 8-membered rings, containing at least one and up to 10 heteroatoms (e.g., from 1 to 5 heteroatoms selected from N, O and S) in stable combinations known to those of skill in the art. Exemplary heterocycloalkyl groups include a fused phenyl ring. When the “heterocyclic” group includes a fused aryl, heteroaryl or cycloalkyl ring, then the “heterocyclic” group is attached to the remainder of the molecule via a heterocycle. A heteroatom can occupy the position at which the heterocycle is attached to the remainder of the molecule.

[0340] Exemplary heterocycloalkyl or heterocyclic groups of the present disclosure include morpholinyl, thiomorpholinyl, thiomorpholinyl S-oxide, thiomorpholinyl S,S-dioxide, piperazinyl, homopiperazinyl, pyrrolidinyl, pyrrolinyl, imidazolidinyl, tetrahydropyranyl, piperidinyl, tetrahydrofuranyl, tetrahydrothienyl, piperidinyl, homopiperidinyl, homomorpholinyl, homothiomorpholinyl, homothiomorpholinyl S,S-dioxide, oxazolidinonyl, dihydropyrazolyl, dihydropyrrolyl, dihydropyrazolyl, dihydropyridyl, dihydropyrimidinyl, dihydrofuryl, dihydropyranyl, tetrahydrothienyl S-oxide, tetrahydrothienyl S,S-dioxide, homothiomorpholinyl S-oxide, 1-(1,2,5,6-tetrahydropyridyl), 1-piperidinyl, 2-piperidinyl, 3-piperidinyl, 4-morpholinyl, 3-morpholinyl, tetrahydrofuran-2-yl, tetrahydrofuran-3-yl, tetrahydrothien-2-yl, tetrahydrothien-3-yl, 1-piperazinyl, 2-piperazinyl, and the like.

[0341] By “aryl” is meant a 5-, 6- or 7-membered, aromatic carbocyclic group having a single ring (e.g., phenyl) or being fused to other aromatic or non-aromatic rings (e.g., from 1 to 3 other rings). When the “aryl” group includes a non-aromatic ring (such as in 1,2,3,4-tetrahydronaphthyl) or heteroaryl group then the “aryl” group is bonded to the remainder of the molecule via an aryl ring (e.g., a phenyl ring). The aryl group is optionally substituted (e.g., with 1 to 5 substituents described herein). In one example, the aryl group has from 6 to 10 carbon atoms. Non-limiting examples of aryl groups include phenyl, 1-naphthyl, 2-naphthyl, quinoline, indanyl, indenyl, dihydronaphthyl, fluorenyl, tetralinyl, benzo[d][1,3]dioxolyl or 6,7,8,9-tetrahydro-5H-benzo[a]cycloheptenyl. In one aspects, the aryl group is selected from phenyl, benzo[d][1,3]dioxolyl and naphthyl. The aryl group, in yet another aspect, is phenyl.

[0342] The term “arylalkyl” or “aralkyl” is meant to include those radicals in which an aryl group or heteroaryl group is attached to an alkyl group to create the radicals -alkyl-aryl and -alkyl-heteroaryl, wherein alkyl, aryl and heteroaryl are defined herein. Exemplary “arylalkyl” or “aralkyl” groups include benzyl, phenethyl, pyridylmethyl and the like.

[0343] By “aryloxy” is meant the group —O-aryl, where aryl is as defined herein. In one example, the aryl portion of the aryloxy group is phenyl or naphthyl. The aryl portion of the aryloxy group, in one aspect, is phenyl.

[0344] The term “heteroaryl” or “heteroaromatic” refers to a polyunsaturated, 5-, 6- or 7-membered aromatic moiety containing at least one heteroatom (e.g., 1 to 5 heteroatoms, such as 1-3 heteroatoms) selected from N, O, S, Si and B (for example, N, O and S), wherein the nitrogen and sulfur atoms are optionally oxidized, and the nitrogen atom(s) are optionally quaternized. The “heteroaryl” group can be a single ring or be fused to other aryl, heteroaryl, cycloalkyl or heterocycloalkyl rings (e.g., from 1 to 3 other rings). When the “heteroaryl” group includes a fused aryl, cycloalkyl or heterocycloalkyl ring, then the “heteroaryl” group is attached to the remainder of the molecule via the heteroaryl ring. A heteroaryl group can be attached to the remainder of the molecule through a carbon- or heteroatom.

[0345] In one example, the heteroaryl group has from 4 to 10 carbon atoms and from 1 to 5 heteroatoms selected from O, S and N. Non-limiting examples of heteroaryl groups include pyridyl, pyrimidinyl, quinolinyl, benzothienyl, indolyl, indolinyl, pyridazinyl, pyrazinyl, isoindolyl, isoquinolyl, quinazolinyl, quinoxalinyl, phthalazinyl, imidazolyl, isoxazolyl, pyrazolyl, oxazolyl, thiazolyl, indolizinyl, indazolyl, benzothiazolyl, benzimidazolyl, benzofuranyl, furanyl, thienyl, pyrrolyl, oxadiazolyl, thiadiazolyl, triazolyl, tetrazolyl, isothiazolyl, naphthyridinyl, isochromanyl, chromanyl, tetrahydroisoquinolinyl, isoindolinyl, isobenzotetrahydrofuranyl, isobenzotetrahydrothienyl, isobenzothienyl, benzoxazolyl, pyridopyridyl, benzotetrahydrofuranyl, benzotetrahydrothienyl, purinyl, benzodioxolyl, triazinyl, pteridinyl, benzothiazolyl, imidazopyridyl, imidazothiazolyl, dihydrobenzisoxazinyl, benzisoxazinyl, benzoxazinyl, dihydrobenzisothiazinyl, benzopyranyl, benzothiopyranyl, chromonyl, chromanonyl, pyridyl-N-oxide, tetrahydroquinolinyl, dihydroquinolinyl, dihydroquinolinonyl, dihydroisoquinolinonyl, dihydrocoumarinyl, dihydroisocoumarinyl, isoindolinonyl, benzodioxanyl, benzoxazolinonyl, pyrrolyl N-oxide, pyrimidinyl N-oxide, pyridazinyl N-oxide, pyrazinyl N-oxide, quinolinyl N-oxide, indolyl N-oxide, indolinyl N-oxide, isoquinolyl N-oxide, quinazolinyl N-oxide, quinoxalinyl N-oxide, phthalazinyl N-oxide, imidazolyl N-oxide, isoxazolyl N-oxide, oxazolyl N-oxide, thiazolyl N-oxide, indolizinyl N-oxide, indazolyl N-oxide, benzothiazolyl N-oxide, benzimidazolyl N-oxide, pyrrolyl N-oxide, oxadiazolyl N-oxide, thiadiazolyl N-oxide, triazolyl N-oxide, tetrazolyl N-oxide, benzothiopyranyl S-oxide, benzothiopyranyl S,S-dioxide. Exemplary heteroaryl groups include imidazolyl, pyrazolyl, thiadiazolyl, triazolyl, isoxazolyl, isothiazolyl, imidazolyl, thiazolyl, oxadiazolyl, and pyridyl. Other exemplary heteroaryl groups include 1-pyrrolyl, 2-pyrrolyl, 3-pyrrolyl, 3-pyrazolyl, 2-imidazolyl, 4-imidazolyl, pyrazinyl, 2-oxazolyl, 4-oxazolyl, 2-phenyl-4-oxazolyl, 5-oxazolyl, 3-isoxazolyl, 4-isoxazolyl, 5-isoxazolyl, 2-thiazolyl, 4-thiazolyl, 5-thiazolyl, 2-furyl, 3-furyl, 2-thienyl, 3-thienyl, 2-pyridyl, 3-pyridyl, pyridin-4-yl, 2-pyrimidyl, 4-pyrimidyl, 5-benzothiazolyl, purinyl, 2-benzimidazolyl, 5-indolyl, 1-isoquinolyl, 5-isoquinolyl, 2-quinoxalinyl, 5-quinoxalinyl, 3-quinolyl, and 6-quinolyl. Substituents for each of the above noted aryl and heteroaryl ring systems are selected from the group of acceptable aryl group substituents described below.

[0346] Examples of aliphatic linkers include the following structures: —O—CO—O—; —NH—CO—O—; —NH—CO—NH—; —NH—(CH₂)ₙ₁—; —S—(CH₂)ₙ₁—; —CO—(CH₂)ₙ₁—CO—; —CO—(CH₂)ₙ₁—NH—; —NH—(CH₂)ₙ₁—NH—; —CO—NH—(CH₂)ₙ₁—NH—CO—; —C(═S)—NH—(CH₂)ₙ₁—NH—CO—; —C(═S)—NH—(CH₂)ₙ₁—NH—C—(═S)—; —CO—O—(CH₂)ₙ₁—O—CO—; —C(═S)—O—(CH₂)ₙ₁—O—CO—; —C(═S)—O—(CH₂)ₙ₁—O—C—(═S); —CO—NH—(CH₂)ₙ₁—O—CO—; —C(═S)—NH—(CH₂)ₙ₁—O—CO—; —C(═S)—NH—(CH₂)ₙ₁—O—C—(═S)—; —CO—NH—(CH₂)ₙ₁—O—CO—; —C(═S)—NH—(CH₂)ₙ₁—CO—; —C(═S)—O—(CH₂)ₙ₁—NH—CO—; —C(═S)—NH—(CH₂)ₙ₁—O—C—(═S)—; —NH—(CH₂CH₂O)ₙ₂—CH(CH₂OH)—; —NH—(CH₂CH₂O)ₙ₂—CH₂—; —NH—(CH₂CH₂O)ₙ₂—CH₂—CO—; —O—(CH₂)ₙ₃—S—S—(CH₂)ₙ₄—O—P(═O)₂—; —CO—(CH₂)ₙ₃—O—CO—NH—(CH₂)ₙ₄—; —CO—(CH₂)ₙ₃—CO—NH—(CH₂)ₙ₄—; —(CH₂)ₙ₁NH—; —C(O)(CH₂)ₙ₁NH—; —C(O) (CH₂)ₙ₁—C(O)—; —C(O)(CH₂)ₙ₁—C(O)O—; —C(O)—O—; —C(O)—(CH2)ₙ₁—NH—C(O)—; —C(O)—(CH₂)ₙ₁—; —C(O)—NH—; —C(O)—; —(CH2)ₙ₁—C(O)—; —(CH2)ₙ₁—C(O)O—; —(CH2)ₙ₁—; —(CH2)ₙ₁—NH—C(O)—; wherein n1 is an integer between 1 and 15 (e.g., 2 to 20, or 2 to 12); n2 is an integer between 1 and 15 (e.g., 1 to 10, or 1 to 6); n3 and n4 may be the same or different and are an integer between 1 and 15 (e.g., 1 to 10, or 1 to 6), and wherein the total number of carbon units in the linker is C₁₅ or less.

[0347] In some aspects, the linker combination comprises (C3)n, (C4)n, (C5)n, (C6)n, (C7)n, or (C8)n, or a combination thereof, wherein n is an integer between 1 and 5, wherein the total number of carbon units in the linker is C15 or less, and each unit is connected, e.g., via a phosphate ester linker, a phosphorothioate ester linkage, or a combination thereof.

### Cleavable Linkers

[0348] In some aspects, different components of a construct disclosed herein, e.g., a construct of Formula 1, can be linked by a cleavable linker. The term cleavable linker refers to a linker comprising at least one linkage or chemical bond that can be broken or cleaved. As used herein, the term cleave refers to the breaking of one or more chemical bonds in a relatively large molecule in a manner that produces two or more relatively smaller molecules. Cleavage may be mediated, e.g., by a nuclease, peptidase, protease, phosphatase, oxidase, or reductase, for example, or by specific physicochemical conditions, e.g., redox environment, pH, presence of reactive oxygen species, or specific wavelengths of light.

[0349] In some aspects, the term “cleavable,” as used herein, refers, e.g., to rapidly degradable linkers, such as, e.g., phosphodiester and disulfides, while the term “non-cleavable” refers, e.g., to more stable linkages, such as, e.g., nuclease-resistant phosphorothioates.

[0350] In some aspects, the cleavable linker is a dinucleotide or trinucleotide linker, a disulfide, an imine, a thioketal, a val-cit dipeptide, or any combination thereof.

[0351] In some aspects, the cleavable linker comprises valine-alanine-p-aminobenzylcarbamate or valine-citrulline-p-aminobenzylcarbamate.

### Cleavable Linkers: Redox Cleavable Linkers

[0352] In some aspects, the linker combination comprises a redox cleavable linker. As a non-limiting example, one type of cleavable linker is a redox cleavable linking group that is cleaved upon reduction or upon oxidation. In some aspects, the redox cleavable linker contains a disulfide bond, i.e., it is a disulfide cleavable linker. Redox cleavable linkers can be reduced, e.g., by intracellular mercaptans, oxidases, or reductases.

### Cleavable Linkers: Reactive Oxygen Species (ROS) Cleavable Linkers

[0353] In some aspects, the linker combination can comprise a cleavable linker which may be cleaved by a reactive oxygen species (ROS), such as superoxide (Of) or hydrogen peroxide (H₂O₂), generated, e.g., by inflammation processes such as activated neutrophils. In some aspects, the ROS cleavable linker is a thioketal cleavable linker. See, e.g., U.S. Pat. No. 8,354,455B2, which is herein incorporated by reference in its entirety.

### Cleavable Linkers: pH Dependent Cleavable Linkers

[0354] In some aspects, the linker is an “acid labile linker” comprising an acid cleavable linking group, which is a linking group that is selectively cleaved under acidic conditions (pH<7).

[0355] As a non-limiting example, the acid cleavable linking group is cleaved in an acidic environment, e.g., about 6.0, 5.5, 5.0 or less. In some aspects, the pH is about 6.5 or less. In some aspects, the linker is cleaved by an agent such as an enzyme that can act as a general acid, e.g., a peptidase (which may be substrate specific) or a phosphatase. Within cells, certain low pH organelles, such as endosomes and lysosomes, can provide a cleaving environment to the acid cleavable linking group. Although the pH of human serum is 7.4, the average pH in cells is slightly lower, ranging from about 7.1 to 7.3. Endosomes also have an acidic pH, ranging from 5.5 to 6.0, and lysosomes are about 5.0 at an even more acidic pH. Accordingly, pH dependent cleavable linkers are sometimes called endosomically labile linkers in the art.

[0356] The acid cleavable group may have the general formula —C═NN—, C(O)O, or —OC(O). In another non-limiting example, when the carbon attached to the ester oxygen (alkoxy group) is attached to an aryl group, a substituted alkyl group, or a tertiary alkyl group such as dimethyl pentyl or t-butyl, for example. Examples of acid cleavable linking groups include, but are not limited to amine, imine, amino ester, benzoic imine, diortho ester, polyphosphoester, polyphosphazene, acetal, vinyl ether, hydrazone, cis-aconitate, hydrazide, thiocarbamoyl, imizine, azidomethyl-methylmaleic anhydride, thiopropionate, a masked endosomolytic agent, a citraconyl group, or any combination thereof. Disulfide linkages are also susceptible to pH.

[0357] In some aspects, the linker comprises a low pH-labile hydrazone bond. Such acid-labile bonds have been extensively used in the field of conjugates, e.g., antibody-drug conjugates. See, for example, Zhou et al (2011) Biomacromolecules 12:1460-7; Yuan et al (2008) Acta Biomater. 4:1024-37; Zhang et al (2007) Acta Biomater. 6:838-50; Yang et al (2007) J. Pharmacol. Exp. Ther. 321:462-8; Reddy et al (2006) Cancer Chemother. Pharmacol. 58:229-36; Doronina et al (2003) Nature Biotechnol. 21:778-84.

[0358] In certain aspects, the linker comprises a low pH-labile bond selected from the following: ketals that are labile in acidic environments (e.g., pH less than 7, greater than about 4) to form a diol and a ketone; acetals that are labile in acidic environments (e.g., pH less than 7, greater than about 4) to form a diol and an aldehyde; imines or iminiums that are labile in acidic environments (e.g., pH less than 7, greater than about 4) to form an amine and an aldehyde or a ketone; silicon-oxygen-carbon linkages that are labile under acidic condition; silicon-nitrogen (silazane) linkages; silicon-carbon linkages (e.g., arylsilanes, vinylsilanes, and allylsilanes); maleamates (amide bonds synthesized from maleic anhydride derivatives and amines); ortho esters; hydrazones; activated carboxylic acid derivatives (e.g., esters, amides) designed to undergo acid catalyzed hydrolysis); or vinyl ethers.

[0359] Further examples may be found in U.S. Pat. Nos. 9,790,494B2 and 8,137,695B2, the contents of which are incorporated herein by reference in their entireties.

### Cleavable Linkers: Enzymatic Cleavable Linkers

[0360] In some aspects, the linker combination can comprise a linker cleavable by intracellular or extracellular enzymes, e.g., proteases, esterases, nucleases, amidades. The range of enzymes that can cleave a specific linker in a linker combination depends on the specific bonds and chemical structure of the linker. Accordingly, peptidic linkers can be cleaved, e.g., by peptidades, linkers containing ester linkages can be cleaved, e.g., by esterases; linkers containing amide linkages can be cleaved, e.g., by amidases; etc.

### Cleavable Linkers: Enzymatic Cleavable Linkers: Protease Cleavable Linkers

[0361] In some aspects, the linker combination comprises a protease cleavable linker, i.e., a linker that can be cleaved by an endogenous protease. Only certain peptides are readily cleaved inside or outside cells. See, e.g., Trout et al., 79 Proc. Natl. Acad. Sci. USA, 626-629 (1982) and Umemoto et al. 43 Int. J. Cancer, 677-684 (1989). Cleavable linkers can contain cleavable sites composed of α-amino acid units and peptidic bonds, which chemically are amide bonds between the carboxylate of one amino acid and the amino group of a second amino acid. Other amide bonds, such as the bond between a carboxylate and the α-amino acid group of lysine, are understood not to be peptidic bonds and are considered non-cleavable.

[0362] In some aspects, the protease-cleavable linker comprises a cleavage site for a protease, e.g., neprilysin (CALLA or CDIO), thimet oligopeptidase (TOP), leukotriene A4 hydrolase, endothelin converting enzymes, ste24 protease, neurolysin, mitochondrial intermediate peptidase, interstitial collagenases, collagenases, stromelysins, macrophage elastase, matrilysin, gelatinases, meprins, procollagen C-endopeptidases, procollagen N-endopeptidases, ADAMs and ADAMTs metalloproteinases, myelin associated metalloproteinases, enamelysin, tumor necrosis factor α-converting enzyme, insulysin, nardilysin, mitochondrial processing peptidase, magnolysin, dactylysin-like metalloproteases, neutrophil collagenase, matrix metallopeptidases, membrane-type matrix metalloproteinases, SP2 endopeptidase, prostate specific antigen (PSA), plasmin, urokinase, human fibroblast activation protein (FAPa), trypsin, chymotrypsins, caldecrin, pancreatic elastases, pancreatic endopeptidase, enteropeptidase, leukocyte elastase, myeloblasts, chymases, tryptase, granzyme, stratum corneum chymotryptic enzyme, acrosin, kallikreins, complement components and factors, alternative-complement pathway c3/c5 convertase, mannose-binding protein-associated serine protease, coagulation factors, thrombin, protein c, u and t-type plasminogen activator, cathepsin G, hepsin, prostasin, hepatocyte growth factor-activating endopeptidase, subtilisin/kexin type proprotein convertases, furin, proprotein convertases, prolyl peptidases, acylaminoacyl peptidase, peptidyl-glycaminase, signal peptidase, n-terminal nucleophile aminohydrolases, 20s proteasome, γ-glutamyl transpeptidase, mitochondrial endopeptidase, mitochondrial endopeptidase Ia, htra2 peptidase, matriptase, site 1 protease, legumain, cathepsins, cysteine cathepsins, calpains, ubiquitin isopeptidase T, caspases, glycosylphosphatidylinositoliprotein transamidase, cancer procoagulant, prohormone thiol protease, γ-Glutamyl hydrolase, bleomycin hydrolase, seprase, cathepsin B, cathepsin D, cathepsin L, cathepsin M, proteinase K, pepsins, chymosyn, gastricsin, renin, yapsin and/or mapsins, Prostate-Specific antigen (PSA), or any Asp-N, Glu-C, Lys-C or Arg-C proteases in general. See, e.g., Cancer Res. 77(24):7027-7037 (2017), which is herein incorporated by reference in its entirety.

[0363] In some aspects, the cleavable linker component comprises a peptide comprising one to ten amino acid residues. In these aspects, the peptide allows for cleavage of the linker by a protease, thereby facilitating release of the biologically active molecule upon exposure to intracellular proteases, such as lysosomal enzymes (Doronina et al. (2003) Nat. Biotechnol. 21:778-784). Exemplary peptides include, but are not limited to, dipeptides, tripeptides, tetrapeptides, pentapeptides, and hexapeptides.

[0364] A peptide may comprise naturally-occurring and/or non-natural amino acid residues. The term “naturally-occurring amino acid” refer to Ala, Asp, Cys, Glu, Phe, Gly, His, He, Lys, Leu, Met, Asn, Pro, Gin, Arg, Ser, Thr, Val, Trp, and Tyr. “Non-natural amino acids” (i.e., amino acids do not occur naturally) include, by way of non-limiting example, homoserine, homoarginine, citrulline, phenylglycine, taurine, iodotyrosine, seleno-cysteine, norleucine (“Nle”), norvaline (“Nva”), beta-alanine, L- or D-naphthalanine, ornithine (“Orn”), and the like. Peptides can be designed and optimized for enzymatic cleavage by a particular enzyme, for example, a tumor-associated protease, cathepsin B, C and D, or a plasmin protease.

[0365] Amino acids also include the D-forms of natural and non-natural amino acids. “D-” designates an amino acid having the “D” (dextrorotary) configuration, as opposed to the configuration in the naturally occurring (“L-”) amino acids. Natural and non-natural amino acids can be purchased commercially (Sigma Chemical Co., Advanced Chemtech) or synthesized using methods known in the art. Exemplary dipeptides include, but are not limited to, valine-alanine, valine-citrulline, phenylalanine-lysine, N-methyl-valine-citrulline, cyclohexylalanine-lysine, and beta-alanine-lysine. Exemplary tripeptides include, but are not limited to, glycine-valine-citrulline (gly-val-cit) and glycine-glycine-glycine (gly-gly-gly).

### Cleavable Linkers: Enzymatic Cleavable Linkers: Esterase Cleavable Linkers

[0366] Some linkers are cleaved by esterases (“esterase cleavable linkers”). Only certain esters can be cleaved by esterases and amidases present inside or outside of cells. Esters are formed by the condensation of a carboxylic acid and an alcohol. Simple esters are esters produced with simple alcohols, such as aliphatic alcohols, and small cyclic and small aromatic alcohols. Examples of ester-based cleavable linking groups include, but are not limited to, esters of alkylene, alkenylene and alkynylene groups. The ester cleavable linking group has the general formula —C(O)O— or —OC(O)—.

### Cleavable Linkers: Enzymatic Cleavable Linkers: Phosphatase Cleavable Linkers

[0367] In some aspects, a linker combination can include a phosphate-based cleavable linking group is cleaved by an agent that degrades or hydrolyzes phosphate groups. An example of an agent that cleaves intracellular phosphate groups is an enzyme such as intracellular phosphatase. Examples of phosphate-based linking groups are —O—P(O)(ORₖ)—O—, —O—P(S)(ORₖ)—O—, —O—P(S)(SRₖ)—O—, —S—P(O)(ORₖ)—O—, —O—P(O)(ORₖ)—S—, —S—P(O)(ORₖ)—S—, —O—P(S)(ORₖ)—S—, —SP(S)(ORₖ)—O—, —OP(O)(Rₖ)—O—, —OP(S)(Rₖ)—O—, —SP(O)(Rₖ)—O—, —SP(S)(Rₖ)—O—, —SP(O)(Rₖ)—S—, or —OP(S)(Rₖ)—S—. In various aspects, Rₖ is any of the following: NH₂, BH₃, CH₃, C₁₋₆ alkyl, C₆₋₁₀ aryl, C₁₋₆ alkoxy and C₆₋₁₀ aryl-oxy. In some aspects, C₁₋₆ alkyl and C₆₋₁₀ aryl are unsubstituted. Further non-limiting examples are —O—P(O)(OH)—O—, —O—P(S)(OH)—O—, —O—P(S)(SH)—O—, —S—P(O)(OH)—O—, O—P(O)(OH)—S—, —S—P(O)(OH)—S—, —O—P(S)(OH)—S—, —S—P(S)(OH)—O—, —O—P(O)(H)—O—, —O—P(S)(H)—O—, —S—P(O)(H)—O—, —SP(S)(H)—O—, —SP(O)(H)—S—, —OP(S)(H)—S—, or —O—P(O)(OH)—O—.

### Cleavable Linkers: Photoactivated Cleavable Linkers

[0368] In some aspects, the combination linker comprises a photoactivated cleavable linker, e.g., a nitrobenzyl linker or a linker comprising a nitrobenzyl reactive group.

### Cleavable Linkers: Self-Immolative Linker

[0369] In some aspects, the linker combination comprises a self-immolative linker. In some aspects, the self-immolative linker in the EV (e.g., exosome) of the present disclosure undergoes 1,4 elimination after the enzymatic cleavage of the protease-cleavable linker. In some aspects, the self-immolative linker in the EV (e.g., exosome) of the present disclosure undergoes 1,6 elimination after the enzymatic cleavage of the protease-cleavable linker. In some aspects, the self-immolative linker is, e.g., a p-aminobenzyl (pAB) derivative, such as a p-aminobenzyl carbamate (pABC), a p-amino benzyl ether (PABE), a p-amino benzyl carbonate, or a combination thereof. In certain aspects, the self-immolative linker comprises an aromatic group. In some aspects, the aromatic group is selected from the group consisting of benzyl, cinnamyl, naphthyl, and biphenyl. In some aspects, the aromatic group is heterocyclic. In other aspects, the aromatic group comprises at least one substituent. In some aspects, the at least one substituent is selected from the group consisting of F, Cl, I, Br, OH, methyl, methoxy, NO₂, NH₂, NO³⁺, NHCOCH₃, N(CH₃)₂, NHCOCF₃, alkyl, haloalkyl, C₁-C8 alkylhalide, carboxylate, sulfate, sulfamate, and sulfonate. In other aspects, at least one C in the aromatic group is substituted with N, O, or C—R*, wherein R* is independently selected from H, F, Cl, I, Br, OH, methyl, methoxy, NO₂, NH₂, NO³⁺, NHCOCH₃, N(CH₃)₂, NHCOCF₃, alkyl, haloalkyl, C₁-C₈ alkylhalide, carboxylate, sulfate, sulfamate, and sulfonate.

[0370] In some aspects, the self-immolative linker comprises an aminobenzyl carbamate group (e.g., para-aminobenzyl carbamate), an aminobenzyl ether group, or an aminobenzyl carbonate group. In one aspect, the self-immolative linker is p-amino benzyl carbamate (pABC). pABC is the most efficient and most widespread connector linkage for self-immolative site-specific prodrug activation (see, e.g., Carl et al. J. Med. Chem. 24:479-480 (1981); WO 1981/001145; Rautio et la, Nature Rev. Drug Disc. 7:255-270 (2008); Simplicio et al., Molecules 13:519-547 (2008)).

[0371] In some aspects, the self-immolative linker connects a biologically active molecule (e.g., an ASO) to a protease-cleavable substrate (e.g, Val-Cit). In specific aspects, the carbamate group of a pABC self-immolative linker is connected to an amino group of a biologically active molecule (e.g., ASO), and the amino group of the pABC self-immolative linker is connected to a protease-cleavable substrate.

[0372] The aromatic ring of the aminobenzyl group can optionally be substituted with one or more (e.g., R₁ and/or R₂) substituents on the aromatic ring, which replace a hydrogen that is otherwise attached to one of the four non-substituted carbons that form the ring. As used herein, the symbol “Rₓ” (e.g., R₁, R₂, R₃, R₄) is a general abbreviation that represents a substituent group as described herein. Substituent groups can improve the self-immolative ability of the p-aminobenzyl group (Hay et al., J. Chem Soc., Perkin Trans. 1:2759-2770 (1999); see also, Sykes et al. J. Chem. Soc., Perkin Trans. 1:1601-1608 (2000)).

[0373] Self-immolative elimination can take place, e.g., via 1,4 elimination, 1,6 elimination (e.g., pABC), 1,8 elimination (e.g., p-amino-cinnamyl alcohol), β-elimination, cyclisation-elimination (e.g., 4-aminobutanol ester and ethylenediamines), cyclization/lactonization, cyclization/lactolization, etc. See, e.g., Singh et al. Curr. Med. Chem. 15:1802-1826 (2008); Greenwald et al. J. Med. Chem. 43:475-487 (2000).

[0374] In some aspects, the self-immolative linker can comprise, e.g., cinnamyl, naphthyl, or biphenyl groups (see, e.g., Blencowe et al. Polym. Chem. 2:773-790 (2011)). In some aspects, the self-immolative linker comprises a heterocyclic ring (see, e.g., U.S. Pat. Nos. 7,375,078; 7,754,681). Numerous homoaromatic (see, e.g., Carl et al. J. Med. Chem. 24:479 (1981); Senter et al. J. Org. Chem. 55:2975 (1990); Taylor et al. J. Org. Chem. 43:1197 (1978); Andrianomenjanahary et al. Bioorg. Med. Chem. Lett. 2:1903 (1992)), and coumarin (see, e.g., Weinstein et al. Chem. Commun. 46:553 (2010)), furan, thiophene, thiazole, oxazole, isoxazole, pyrrole, pyrazole (see, e.g., Hay et al. J. Med. Chem. 46:5533 (2003)), pyridine (see, e.g., Perry-Feigenbaum et al. Org. Biomol. Chem. 7:4825 (2009)), imidazone (see, e.g., Nailor et al. Bioorg. Med. Chem. Lett. Z:1267 (1999); Hay and Denny, Tetrahedron Lett. 38:8425 (1997)), and triazole (see, e.g., Bertrand and Gesson, J. Org. Chem. 72:3596 (2007)) based heteroaromatic groups that are self-immolative under both aqueous and physiological conditions are known in the art. See also, U.S. Pat. Nos. 7,691,962; 7,091,186; U.S. Pat. Publ. Nos. US2006/0269480; US2010/0092496; US2010/0145036; US2003/0130189; US2005/0256030)

[0375] In some aspects, a linker combination disclosed herein comprises more than one self-immolative linker in tandem, e.g., two or more pABC units. See, e.g., de Groot et al. J. Org. Chem. 66:8815-8830 (2001). In some aspects, a linker combination disclosed herein can comprise a self-immolative linker (e.g., a p-aminobenzylalcohol or a hemithioaminal derivative of p-carboxybenzaldehyde or glyoxilic acid) linked to a fluorigenic probe (see, e.g., Meyer et al. Org. Biomol. Chem. 8:1777-1780 (2010)).

[0376] Where substituent groups in the self-immolative linker s are specified by their conventional chemical formulae, written from left to right, they equally encompass the chemically identical substituents, which would result from writing the structure from right to left. For example, “—CH₂O—” is intended to also recite “—OCH₂—”.

[0377] Substituent groups in self-immolative, for example, R₁ and/or R₂ substituents in a p-aminobenzyl self-immolative linker as discuss above can include, e.g., alkyl, alkylene, alkenyl, alkynyl, alkoxy, alkylamino, alkylthio, heteroalkyl, cycloalkyl, heterocycloalkyl, aryl, arylalkyl, aryloxy, heteroaryl, etc. When a compound of the present disclosure includes more than one substituent, then each of the substituents is independently chosen.

[0378] In some specific aspects, the self-immolative linker is attached to cleavable peptide linker has the following formula, the combination having the following formula:

-Aₐ-Yy-
[0379] wherein each -A- is independently an amino acid unit or a combination thereof, a is independently an integer from 1 to 12; and -Y- is a self-immolative spacer, and y is 1, or 2. In some aspects, -Aₐ- is a dipeptide, a tripeptide, a tetrapeptide, a pentapeptide, or a hexapeptide. In some aspects, -Aₐ- is selected from the group consisting of valine-alanine, valine-citrulline, phenylalanine-lysine, N-methylvaline-citrulline, cyclohexylalanine-lysine, and beta-alanine-lysine. In some aspects, -Aₐ- is valine-alanine or valine-citrulline.

[0380] In some aspects, the self-immolative linker -Yy- has the following formula:

[chemical structure]

[0381] wherein each R² is independently C₁₋₈ alkyl, —O—(C₁₋₈ alkyl), halogen, nitro, or cyano; and m is an integer from 0 to 4. In some aspects, m is 0, 1, or 2. In some aspects, m is 0.

[0382] In some aspects, the cleavable linker is a cleavable peptide liker (e.g., a dipeptide linker) comprising a self-immolative linker, for example, valine-alanine-p-aminobenzylcarbamate or valine-citrulline-p-aminobenzylcarbamate.

### Peptide Linkers

[0383] In some aspects, the term “linker” refers to a peptide or polypeptide sequence (e.g., a synthetic peptide or polypeptide sequence) or to a non-polypeptide, e.g., an alkyl chain. In some aspects, two or more linkers can be linked in tandem. Generally, linkers provide flexibility or prevent/ameliorate steric hindrances. Linkers are not typically cleaved; however, in certain aspects, such cleavage can be desirable. Accordingly, in some aspects a linker can comprise one or more protease-cleavable sites, which can be located within the sequence of the linker or flanking the linker at either end of the linker sequence.

[0384] In some aspects, the linker is a peptide linker. In some aspects, the peptide linker can comprise at least about two, at least about three, at least about four, at least about five, at least about 10, at least about 15, at least about 20, at least about 25, at least about 30, at least about 35, at least about 40, at least about 45, at least about 50, at least about 55, at least about 60, at least about 65, at least about 70, at least about 75, at least about 80, at least about 85, at least about 90, at least about 95, or at least about 100 amino acids.

[0385] In some aspects, the linker is a glycine/serine linker. In some aspects, the peptide linker is glycine/serine linker according to the formula [(Gly)n-Ser]m where n is any integer from 1 to 100 and m is any integer from 1 to 100. In other aspects, the glycine/serine linker is according to the formula [(Gly)x-Sery]z wherein x in an integer from 1 to 4, y is 0 or 1, and z is an integer from 1 to 50. In some aspects, the peptide linker comprises the sequence Gn, where n can be an integer from 1 to 100. In some aspects, the peptide linker can comprise the sequence (GlyAla)n, wherein n is an integer between 1 and 100. In other aspects, the peptide linker can comprise the sequence (GlyGlySer)n, wherein n is an integer between 1 and 100.

[0386] In some aspects, the peptide linker is synthetic, i.e., non-naturally occurring. In one aspect, a peptide linker includes peptides (or polypeptides) (e.g., natural or non-naturally occurring peptides) which comprise an amino acid sequence that links or genetically fuses a first linear sequence of amino acids to a second linear sequence of amino acids to which it is not naturally linked or genetically fused in nature. For example, in one aspect the peptide linker can comprise non-naturally occurring polypeptides which are modified forms of naturally occurring polypeptides (e.g., comprising a mutation such as an addition, substitution or deletion).

[0387] In other aspects, the peptide linker can comprise non-naturally occurring amino acids. In yet other aspects, the peptide linker can comprise naturally occurring amino acids occurring in a linear sequence that does not occur in nature. In still other aspects, the peptide linker can comprise a naturally occurring polypeptide sequence.

### Biologically Active Molecule [BAM]

[0388] In some aspects, an EV (e.g., exosome) disclosed herein is capable of delivering a biologically active molecule [BAM] attached to the EV, e.g., exosome, via an anchoring moiety [AM], wherein the anchoring moiety [AM] is connected to the biologically active molecule [BAM] via an optimized linker disclosed herein. The biologically active molecule [BAM] is an agent that acts on a target (e.g., a target cell). Contacting can occur in vitro or in a subject. Non-limiting examples of biologically active molecules [BAM] that can attached to an EV (e.g., exosome) as described in the present disclosure include agents such as, nucleotides (e.g., nucleotides comprising a detectable moiety or a toxin or that disrupt transcription), nucleic acids (e.g., DNA or mRNA molecules that encode a polypeptide such as an enzyme, or RNA molecules that have regulatory function such as miRNA, dsDNA, lncRNA, mRNA, siRNA, or ASO), amino acids (e.g., amino acids comprising a detectable moiety or a toxin that disrupt translation), polypeptides (e.g., enzymes), lipids, carbohydrates, and small molecules (e.g., small molecule drugs and toxins).

[0389] In some aspects, an EV (e.g., exosome) disclosed herein can comprise more than one biologically active molecule [BAM] attached, e.g., using the constructs disclosed herein. For example, in some aspects, the EV (e.g., exosome) can comprise multiple populations of constructs of the present disclosure (e.g., a construct of Formula 1), wherein each population of constructs carry a different biologically active molecule [BAM].

[0390] Accordingly, in some aspects a population of EVs, e.g., exosomes, of the present disclosed can comprise a plurality of construct as exemplified below.

[AM₁]-(optimized linker₁)-[BAM₁]

[AM₂]-(optimized linker₂)-[BAM₂]

. . .

[AMₙ]-(optimized linkerₙ)-[BAMₙ]
[0391] wherein [AM₁] . . . [AMₙ] can be the same or different anchoring moieties, (optimized linker₁) . . . (optimized linkerₙ) can be the same or different optimized linkers, and [BAM₁] . . . [BAMₙ] can be the same of different biologically active molecules.

[0392] In some aspects, the EVs (e.g., exosomes) of the present disclosure can comprise constructs comprising optimized linkers disclosed herein (e.g., constructs of Formula 1), wherein each construct carries more than one biologically active molecule [BAM], as exemplified below.

[AM]-(optimized linker)-[BAM₁] . . . [BAMₙ]
[0393] wherein [BAM1] . . . [BAMₙ] can be the same of different biologically active molecules.

[0394] In some aspects, a construct comprising an optimized liner disclosed herein can comprise multiple biologically active molecules in a non-linear arrangement as exemplified below, e.g., arrangement comprising two, three, or more biologically active moieties is an branched arrangement.
[0395] [BAM1]
[0396] [AM]-(optimized linker)---|
[0397] [BAM2]
[0398] [BAM1]
[0399] [AM]-(optimized linker)---|---[BAM2]
[0400] [BAM3]

[0401] In some aspects, the EV, e.g., exosome of the present disclosure can comprise populations of constructs comprising any of the topological arrangements disclosed above and combinations thereof.

[0402] In some aspects, the biologically active molecule [BAM] targets a tumor antigen. Non-limiting examples of tumor antigens include: alpha-fetoprotein (AFP), carcinoembryonic antigen (CEA), epithelial tumor antigen (ETA), mucin 1 (MUC1), Tn-MUC1, mucin 16 (MUC16), tyrosinase, melanoma-associated antigen (MAGE), tumor protein p53 (p53), CD4, CD8, CD45, CD80, CD86, programmed death ligand 1 (PD-L₁), programmed death ligand 2 (PD-L₂), NY-ESO-1, PSMA, TAG-72, HER2, GD2, cMET, EGFR, Mesothelin, VEGFR, alpha-folate receptor, CE7R, IL-3, Cancer-testis antigen (CTA), MART-1 gp100, TNF-related apoptosis-inducing ligand, or combinations thereof.

[0403] In some aspects, the biologically active molecule [BAM] is targeting moiety, e.g., an antibody or binding portion thereof or a ligand, that specifically binds to a marker on a muscle cell. In some aspects, the muscle cell is a smooth muscle cell. In some aspects, the muscle cell is a skeletal muscle cell. In some aspects, the muscle cell is a cardiac muscle cell. In some aspects, the marker on the muscle cell is selected from alpha-smooth muscle actin, VE-cadherin, caldesmon/CALD1, calponin 1, hexim 1, histamine H2 R; motilin R/GPR38, transgelin/TAGLN, and any combination thereof. In some aspects, the marker on the muscle cell is selected from alpha-sarcoglycan, beta-sarcoglycan, calpain inhibitors, creatine kinase MM/CKMM, eIF5A, enolase 2/neuron-specific enolase, epsilon-sarcoglycan, FABP3/H-FABP, GDF-8/Myostatin, GDF-11/GDF-8, integrin alpha 7, integrin alpha 7 beta 1, integrin beta 1/CD29, MCAM/CD146, MyoD, myogenin, myosin light chain kinase inhibitors, NCAM-1/CD56, troponin I, and any combination thereof. In some aspects, the marker on the muscle cell is myosin heavy chain, myosin light chain, or a combination thereof.

[0404] In some aspects, the biologically active molecule [BAM] is a small molecule. In some aspects, the small molecule is a proteolysis-targeting chimera (PROTAC). In some aspects, the biologically active molecule [BAM] comprises a nucleotide, wherein the nucleotide is a stimulator of interferon genes protein (STING) agonist. STING is a cytosolic sensor of cyclic dinucleotides that is typically produced by bacteria. Upon activation, it leads to the production of type I interferons and initiates an immune response

[0405] In some aspects, the STING agonist comprises a cyclic nucleotide STING agonist or a non-cyclic dinucleotide STING agonist. Cyclic purine dinucleotides such as, but not limited to, cGMP, cyclic di-GMP (c-di-GMP), CAMP, cyclic di-AMP (c-di-AMP), cyclic-GMP-AMP (cGAMP), cyclic di-IMP (c-di-IMP), cyclic AMP-IMP (cAIMP), and any analogue thereof, are known to stimulate or enhance an immune or inflammation response in a patient. The CDNs may have 2′2′, 2′3′, 2′5′, 3′3′, or 3′5′ bonds linking the cyclic dinucleotides, or any combination thereof. Cyclic purine dinucleotides may be modified via standard organic chemistry techniques to produce analogues of purine dinucleotides. Suitable purine dinucleotides include, but are not limited to, adenine, guanine, inosine, hypoxanthine, xanthine, isoguanine, or any other appropriate purine dinucleotide known in the art. The cyclic dinucleotides may be modified analogues. Any suitable modification known in the art may be used, including, but not limited to, phosphorothioate, biphosphorothioate, fluorinate, and difluorinate modifications. Non cyclic dinucleotide agonists may also be used, such as 5,6-Dimethylxanthenone-4-acetic acid (DMXAA), or any other non-cyclic dinucleotide agonist known in the art.

[0406] It is contemplated that any STING agonist may be used as a biologically active molecule [BAM]. Among the STING agonists are DMXAA, STING agonist-1, ML RR-S2 CDA, ML RR-S2c-di-GMP, ML-RR-S2 cGAMP, 2′3′-c-di-AM(PS)2, 2′3′-cGAMP, 2′3′-cGAMPdFHS, 3′3′-cGAMP, 3′3′-cGAMPdFSH, cAIMP, cAIM(PS)2, 3′3′-cAIMP, 3′3′-CAIMPdFSH, 2′2′-cGAMP, 2′3′-cGAM(PS)2, 3′3′-cGAMP, c-di-AMP, 2′3′-c-di-AMP, 2′3′-c-di-AM(PS)2, c-di-GMP, 2′3′-c-di-GMP, c-di-IMP, c-di-UMP or any combination thereof. In a specific aspect, the STING agonist is 3′3′-cAIMPdFSH, alternatively named 3-3 cAIMPdFSH. Additional STING agonists known in the art may also be used.

[0407] In some aspects, the biologically active molecule [BAM] is an antibody or antigen binding fragment thereof. In some aspects, the biologically active molecule [BAM] is an antibody-drug conjugate (ADC). In some aspects, the biologically active molecule [BAM] is a small molecule comprising a synthetic antineoplastic agent (e.g., monomethyl auristatin E (MMAE) (vedotin)), a cytokine release inhibitor (e.g., MCC950), an mTOR inhibitor (e.g., rapamycin and its analogs (rapalogs)), an autotaxin inhibitor (e.g., PAT409 or PAT505), a lysophosphatidic acid receptor antagonist (e.g., BMS-986020), a STING antagonist (e.g., CL656), or any combination thereof). In some aspects, the biologically active molecule [BAM] is a fusogenic peptide.

[0408] In some aspects, the biologically active molecule [BAM] comprises an antisense oligonucleotide (ASO). In some aspects, the ASO targets various genes (transcripts) expressed in vivo. In some aspects, a biologically active molecule of the present disclosure comprises morpholino backbone structures disclosed in U.S. Pat. No. 5,034,506, which is herein incorporated by reference in its entirety).

[0409] In some aspects, the biologically active molecule [BAM] targets macrophages. In other aspects, the biologically active molecule induces macrophage polarization. Macrophage polarization is a process by which macrophages adopt different functional programs in response to the signals from their microenvironment. This ability is connected to their multiple roles in the organism: they are powerful effector cells of innate immune system, but also important in removal of cellular debris, embryonic development and tissue repair.

[0410] By simplified classification, macrophage phenotype has been divided into 2 groups: M1 (classically activated macrophages) and M2 (alternatively activated macrophages). This broad classification was based on in vitro studies, in which cultured macrophages were treated with molecules that stimulated their phenotype switching to particular state. In addition to chemical stimulation, it has been shown that the stiffness of the underlying substrate a macrophage is grown on can direct polarization state, functional roles and migration mode. M1 macrophages were described as the pro-inflammatory type, important in direct host-defense against pathogens, such as phagocytosis and secretion of pro-inflammatory cytokines and microbicidal molecules. M2 macrophages were described to have quite the opposite function: regulation of the resolution phase of inflammation and the repair of damaged tissues. Later, more extensive in vitro and ex vivo studies have shown that macrophage phenotypes are much more diverse, overlapping with each other in terms of gene expression and function, revealing that these many hybrid states form a continuum of activation states which depend on the microenvironment. Moreover, in vivo, there is a high diversity in gene expression profile between different populations of tissue macrophages. Macrophage activation spectrum is thus considered to be wider, involving complex regulatory pathway to response to plethora of different signals from the environment. The diversity of macrophage phenotypes still remains to be fully characterized in vivo.

[0411] The imbalance of the macrophage types is related to a number of immunity-related diseases. For example, increased M1/M2 ratio may correlate with development of inflammatory bowel disease, as well as obesity in mice. On the other side, in vitro experiments implicated M2 macrophages as the primary mediators of tissue fibrosis. Several studies have associated the fibrotic profile of M2 macrophages with the pathogenesis of systemic sclerosis. Non-limiting examples of the macrophage targeting biologically active molecules are: PI3Kγ (phosphatidylinositol-4,5-bisphosphate 3-kinase catalytic subunit gamma), RIP1 (Receptor Interacting Protein (RIP) kinase 1, RIPK1), HIF-1α (Hypoxia-inducible factor 1-alpha), AHR1 (Adhesion and hyphal regulator 1), miR146a, miR155, IRF4 (Interferon regulatory factor 4), PPARγ (Peroxisome proliferator-activated receptor gamma), IL-4RA (Interleukin-4 receptor subunit alpha), TLR8 (Toll-like receptor 8), and TGF-β1 (Transforming growth factor beta-1 proprotein)

[0412] In some aspects, the BAM comprises an ASO (e.g., an ASO targeting NLRP3, STAT6, CEBP/β, STAT3, NRas, KRAS, Pmp22 disclosed below). In some aspects, the ASO is a gapmer, a mixmer, or a totalmer. In some aspects, the ASO (e.g., an ASO targeting NLRP3, STAT6, CEBP/β, STAT3, NRas, KRAS, Pmp22 disclosed below) can comprise one or more nucleosides which have a modified sugar moiety, i.e. a modification of the sugar moiety when compared to the ribose sugar moiety found in DNA and RNA. Numerous nucleosides with modification of the ribose sugar moiety have been made, primarily with the aim of improving certain properties of oligonucleotides, such as affinity and/or nuclease resistance.

[0413] Such modifications include those where the ribose ring structure is modified, e.g. by replacement with a hexose ring (HNA), or a bicyclic ring, which typically have a biradical bridge between the C2′ and C4′ carbons on the ribose ring (LNA), or an unlinked ribose ring which typically lacks a bond between the C2′ and C3′ carbons (e.g., UNA). Other sugar modified nucleosides include, for example, bicyclohexose nucleic acids (WO2011/017521) or tricyclic nucleic acids (WO2013/154798). Modified nucleosides also include nucleosides where the sugar moiety is replaced with a non-sugar moiety, for example in the case of peptide nucleic acids (PNA), or morpholino nucleic acids.

[0414] Sugar modifications also include modifications made via altering the substituent groups on the ribose ring to groups other than hydrogen, or the 2′—OH group naturally found in RNA nucleosides. Substituents may, for example be introduced at the 2′, 3′, 4′, or 5′ positions. Nucleosides with modified sugar moieties also include 2′ modified nucleosides, such as 2′ substituted nucleosides. Indeed, much focus has been spent on developing 2′ substituted nucleosides, and numerous 2′ substituted nucleosides have been found to have beneficial properties when incorporated into oligonucleotides, such as enhanced nucleoside resistance and enhanced affinity.

[0415] A 2′ sugar modified nucleoside is a nucleoside which has a substituent other than H or —OH at the 2′ position (2′ substituted nucleoside) or comprises a 2′ linked biradical, and includes 2′ substituted nucleosides and LNA (2′- 4′ biradical bridged) nucleosides. For example, the 2′ modified sugar may provide enhanced binding affinity (e.g., affinity enhancing 2′ sugar modified nucleoside) and/or increased nuclease resistance to the oligonucleotide. Examples of 2′ substituted modified nucleosides are 2′-O-alkyl-RNA, 2′-O-methyl-RNA, 2′-alkoxy-RNA, 2′-O-methoxyethyl-RNA (MOE), 2′-amino-DNA, 2′-Fluoro-RNA, 2′-Fluro-DNA, arabino nucleic acids (ANA), and 2′-Fluoro-ANA nucleoside. For further examples, please see, e.g., Freier & Altmann; Nucl. Acid Res., 1997, 25, 4429-4443; Uhlmann, Curr. Opinion in Drug Development, 2000, 3(2), 293-213; and Deleavey and Damha, Chemistry and Biology 2012, 19, 937. Below are illustrations of some 2′ substituted modified nucleosides.

[chemical structure]

[0416] LNA nucleosides are modified nucleosides which comprise a linker group (referred to as a biradical or a bridge) between C2′ and C4′ of the ribose sugar ring of a nucleoside (i.e., 2′-4′ bridge), which restricts or locks the conformation of the ribose ring. These nucleosides are also termed bridged nucleic acid or bicyclic nucleic acid (BNA) in the literature. The locking of the conformation of the ribose is associated with an enhanced affinity of hybridization (duplex stabilization) when the LNA is incorporated into an oligonucleotide for a complementary RNA or DNA molecule. This can be routinely determined by measuring the melting temperature of the oligonucleotide/complement duplex.

[0417] Non limiting, exemplary LNA nucleosides are disclosed in WO99/014226, WO00/66604, WO98/039352, WO2004/046160, WO00/047599, WO2007/134181, WO2010/077578, WO2010/036698, WO2007/090071, WO2009/006478, WO2011/156202, WO2008/154401, WO2009/067647, WO2008/150729, Morita et al., Bioorganic & Med. Chem. Lett. 12, 73-76, Seth et al., J. Org. Chem. 2010, Vol 75(5) pp. 1569-81, or Mitsuoka et al., Nucleic Acids Research 2009, 37(4), 1225-1238, all of which are herein incorporated by reference in their entireties. In some aspects, the modified nucleoside or the LNA nucleosides of an ASO of the disclosure has a general structure of the Formula I or Formula II:

[chemical structure]

wherein
[0418] W is selected from —O—, —S—, —N(R^{a})—, —C(R^{a}R^{b})—, in particular —O—;
[0419] B is a nucleobase or a modified nucleobase moiety;
[0420] Z is an internucleoside linkage to an adjacent nucleoside or a 5′-terminal group;
[0421] Z* is an internucleoside linkage to an adjacent nucleoside or a 3′-terminal group;
[0422] R¹, R², R³, R⁵ and R⁵* are independently selected from hydrogen, halogen, alkyl, alkenyl, alkynyl, hydroxy, alkoxy, alkoxyalkyl, alkenyloxy, carboxyl, alkoxycarbonyl, alkylcarbonyl, formyl, azide, heterocycle and aryl; and
[0423] X, Y, R^{a} and R^{b} are as defined herein.

### ASO Targeting NLRP3

[0424] In some aspects, the biologically active molecule [BAM] is an anti-NLRP3 ASO. NLRP3 (NLRP3) is also known as NLR family pyrin domain containing 3. Unless indicated otherwise, the term “NLRP3,” as used herein, can refer to NLRP3 from one or more species (e.g., humans, non-human primates, dogs, cats, guinea pigs, rabbits, rats, mice, horses, cattle, and bears). The sequence for the human NLRP3 gene can be found under publicly available GenBank Accession Number NC_000001.11:247416156-247449108. The human NLRP3 gene is found at chromosome location 1q44 at 247,416,156-247,449,108. The sequence for the human NLRP3 pre-mRNA transcript (SEQ ID NO: 1) corresponds to the reverse complement of residues 247,416,156-247,449,108 of chromosome 1q44. The NLRP3 mRNA sequence (GenBank Accession No. NM_001079821.2) is provided in SEQ ID NO: 3, except that the nucleotide “t” in SEQ ID NO: 3 is shown as “u” in the mRNA. The sequence for human NLRP3 protein can be found under publicly available Accession Numbers: Q96P20, (canonical sequence, SEQ ID NO: 2), Q96P20-2 (SEQ ID NO: 4), Q96P20-3 (SEQ ID NO: 5), Q96P20-4 (SEQ ID NO: 6), Q96P20-5 (SEQ ID NO: 7), and Q96P20-6 (SEQ ID NO: 8), each of which is incorporated by reference herein in its entirety. The anti-NLRP3 ASOs of the present disclosure can be designed to reduce or inhibit expression of the natural variants of the NLRP3 protein.

[0425] An example of a target nucleic acid sequence of the anti-NLRP3 ASOs is NLRP3 pre-mRNA. SEQ ID NO: 1 represents a human NLRP3 genomic sequence (i.e., reverse complement of nucleotides 247,416,156-247,449,108 of chromosome 1q44). SEQ ID NO: 1 is identical to a NLRP3 pre-mRNA sequence except that nucleotide “t” in SEQ ID NO: 1 is shown as “u” in pre-mRNA. In certain aspects, the “target nucleic acid” comprises an intron of a NLRP3 protein-encoding nucleic acids or naturally occurring variants thereof, and RNA nucleic acids derived therefrom, e.g., pre-mRNA. In other aspects, the target nucleic acid comprises an exon region of a NLRP3 protein-encoding nucleic acids or naturally occurring variants thereof, and RNA nucleic acids derived therefrom, e.g., pre-mRNA. In yet other aspects, the target nucleic acid comprises an exon-intron junction of a NLRP3 protein-encoding nucleic acids or naturally occurring variants thereof, and RNA nucleic acids derived therefrom, e.g., pre-mRNA. The human NLRP3 protein sequence encoded by the NLRP3 pre-mRNA is shown as SEQ ID NO: 3. In other aspects, the target nucleic acid comprises an untranslated region of a NLRP3 protein-encoding nucleic acids or naturally occurring variants thereof, e.g., 5′ UTR, 3′ UTR, or both.

[0426] In some aspects, an anti-NLRP3 ASO of the disclosure hybridizes to a region within the introns of a NLRP3 transcript, e.g., SEQ ID NO: 1. In certain aspects, an anti-NLRP3 ASO of the disclosure hybridizes to a region within the exons of a NLRP3 transcript, e.g., SEQ ID NO: 1. In other aspects, an anti-NLRP3 ASO of the disclosure hybridizes to a region within the exon-intron junction of a NLRP3 transcript, e.g., SEQ ID NO: 1. In some aspects, an anti-NLRP3 ASO of the disclosure hybridizes to a region within a NLRP3 transcript (e.g., an intron, exon, or exon-intron junction), e.g., SEQ ID NO: 1, wherein the anti-NLRP3 ASO has a gapmer design.

[0427] In some aspects, the anti-NLRP3 ASO targets a mRNA encoding a particular isoform of NLRP3 protein (e.g., Isoform 1). In some aspects, the anti-NLRP3 ASO targets all isoforms of NLRP3 protein. In other aspects, the anti-NLRP3 ASO targets two isoforms (e.g., Isoform 1 and Isoform 2, Isoform 3 and Isoform 4, and Isoform 5 and Isoform 6) of NLRP3 protein.

[0428] In some aspects, the nucleotide sequence of the anti-NLRP3 ASOs of the disclosure or the contiguous nucleotide sequence has at least about 80% sequence identity to a sequence selected from SEQ ID NOs: 101 to 200, such as at least about 80%, at least about 85%, at least about 90%, at least about 91%, at least about 92%, at least about 93%, at least about 94%, at least about 95%, at least about 96% sequence identity, at least about 97% sequence identity, at least about 98% sequence identity, at least about 99% sequence identity, such as about 100% sequence identity (homologous).

[0429] In some aspects, the anti-NLRP3 ASO (or contiguous nucleotide portion thereof) is selected from, or comprises, one of the sequences selected from the group consisting of SEQ ID NOs: 101 to 200 or a region of at least 10 contiguous nucleotides thereof, wherein the anti-NLRP3 ASO (or contiguous nucleotide portion thereof) can optionally comprise one, two, three, or four mismatches when compared to the corresponding NLRP 3 transcript.

[0430] In some aspects, the anti-NLRP3 ASO comprises a sequence selected from the group consisting of SEQ ID NO: 101-200.

[0431] In some aspects, the anti-NLRP3 ASO comprises a sequence as set forth in any one of SEQ ID NOs: 101 to 200. In some aspects, the anti-NLRP3 ASO comprises or consists of a sequence at least about 60%, at least about 65%, at least about 70%, at least about 75%, at least about 80%, at least about 85%, at least about 90%, at least about 95%, at least about 96%, at least about 97%, at least about 98%, at least about 99%, or about 100% identical to a sequence set forth in SEQ ID NOs: 101 to 200. In some aspects, the anti-NLRP3 ASO (or contiguous nucleotide portion thereof) is selected from, or comprises, one of the sequences selected from the group consisting of SEQ ID NOs: 101 to 200 or a region of at least 8, 9, 10, 11, 12, 13, 14, 15, 16, 17, 18, 19, or 20 contiguous nucleotides thereof. In some aspects, the anti-NLRP3 ASO (or contiguous nucleotide portion thereof) is selected from, or comprises, one of the sequences selected from the group consisting of SEQ ID NOs: 101 to 200 or a region of at least 8, 9, 10, 11, 12, 13, 14, 15, 16, 17, 18, 19, or 20 contiguous nucleotides thereof, wherein the anti-NLRP3 ASO (or contiguous nucleotide portion thereof) can optionally comprise one, two, three, or four mismatches when compared to the corresponding NLRP3 transcript. In some aspects, the anti-NLRP3 ASO (or contiguous nucleotide portion thereof) is selected from, or comprises, one of the sequences selected from the group consisting of SEQ ID NOs: 101 to 200 except for 1, 2, 3, 4, 5, 6, 7, 8, 9 or 10 substitutions, wherein the substituted ASO can bind to the NLRP3 transcript. In some aspects, the anti-NLRP3 ASO (or contiguous nucleotide portion thereof) is selected from, or comprises, one of the sequences selected from the group consisting of SEQ ID NOs: 101 to 200 or a region of at least 8, 9, 10, 11, 12, 13, 14, 15, 16, 17, 18, 19, or 20 contiguous nucleotides thereof, wherein the anti-NLRP3 ASO (or contiguous nucleotide portion thereof) can optionally comprise one, two, three, or four additional 5′ and/or 3′ nucleotides complementary to the corresponding NLRP3 transcript.

[0432] In some aspects, binding of an anti-NLRP3 ASO targeting a NLRP3 transcript disclosed herein to a mRNA transcript encoding NLRP3 can reduce expression levels and/or activity levels of NLRP3.

[0433] In some aspects, any anti-NLRP3 ASO described herein can be part of an EV (e.g., exosome) of the present disclosure, i.e., an EV (e.g., exosome) a comprising construct comprising an optimized linker disclosed herein, e.g., a construct of Formula 1 where the biologically active moiety [BAM] is an anti-NLRP3 ASO described herein or a combination thereof.

### ASO Targeting STAT6

[0434] In some aspects, the biologically active molecule [BAM] is an anti-STAT6 ASO. STAT6 (STAT6) is also known as signal transducer and activator of transcription 6. Unless indicated otherwise, the term “STAT6,” as used herein, can refer to STAT6 from one or more species (e.g., humans, non-human primates, dogs, cats, guinea pigs, rabbits, rats, mice, horses, cattle, and bears).

[0435] The sequence for the human STAT6 pre-mRNA transcript (SEQ ID NO: 11) corresponds to the reverse complement of residues 57111413-57095404, complement, of chromosome 12q13.3. The STAT6 mRNA sequence (GenBank k Accession No. NM_001178078.1) is provided in SEQ ID NO: 13, except that the nucleotide “t” in SEQ ID NO: 13 is shown as “u” in the mRNA. The sequence for human STAT6 protein can be found under publicly available Accession Numbers: P42226-1, (canonical sequence, SEQ ID NO: 12), P42226-2 (SEQ ID NO: 14), and P42226-3 (SEQ ID NO: 15), each of which is incorporated by reference herein in its entirety.

[0436] Natural variants of the human STAT6 gene product are known. For example, natural variants of human STAT6 protein can contain one or more amino acid substitutions selected from: M118R, D419N, and any combination thereof. Additional variants of human STAT6 protein resulting from alternative splicing are also known in the art. STAT6 Isoform 2 (identifier: P42226-2 at UniProt) differs from the canonical sequence (SEQ ID NO: 13) as follows: deletion of residues 1-174 and substitution of ₁₇₅PSE₁₇₇ with ₁₇₅MEQ₁₇₇ relative to SEQ ID NO: 13. The sequence of STAT6 Isoform 3 (identifier: P42226-3) differs from the canonical sequence (SEQ ID NO: 13) as follows: deletion of residues 1-110 relative to SEQ ID NO: 13. Therefore, the anti-STAT6 ASOs of the present disclosure can be designed to reduce or inhibit expression of the natural variants of the STAT6 protein.

[0437] An example of a target nucleic acid sequence of the anti-STAT6 ASOs is STAT6 pre-mRNA. SEQ ID NO: 11 represents a human STAT6 genomic sequence (i.e., reverse complement of nucleotides 57111413-57095404, complement, of chromosome 12q13.3). SEQ ID NO: 11 is identical to a STAT6 pre-mRNA sequence except that nucleotide “t” in SEQ ID NO: 11 is shown as “u” in pre-mRNA. In certain aspects, the “target nucleic acid” comprises an intron of a STAT6 protein-encoding nucleic acids or naturally occurring variants thereof, and RNA nucleic acids derived therefrom, e.g., pre-mRNA. In other aspects, the target nucleic acid comprises an exon region of a STAT6 protein-encoding nucleic acids or naturally occurring variants thereof, and RNA nucleic acids derived therefrom, e.g., pre-mRNA. In yet other aspects, the target nucleic acid comprises an exon-intron junction of a STAT6 protein-encoding nucleic acids or naturally occurring variants thereof, and RNA nucleic acids derived therefrom, e.g., pre-mRNA. The human STAT6 protein sequence encoded by the STAT6 pre-mRNA is shown as SEQ ID NO: 13. In other aspects, the target nucleic acid comprises an untranslated region of a STAT6 protein-encoding nucleic acids or naturally occurring variants thereof, e.g., 5′ UTR, 3′ UTR, or both.

[0438] In some aspects, an anti-STAT6 ASO of the disclosure hybridizes to a region within the introns of a STAT6 transcript, e.g., SEQ ID NO: 11. In certain aspects, an anti-STAT6 ASO of the disclosure hybridizes to a region within the exons of a STAT6 transcript, e.g., SEQ ID NO: 11. In other aspects, an anti-STAT6 ASO of the disclosure hybridizes to a region within the exon-intron junction of a STAT6 transcript, e.g., SEQ ID NO: 11. In some aspects, an anti-STAT6 ASO of the disclosure hybridizes to a region within a STAT6 transcript (e.g., an intron, exon, or exon-intron junction), e.g., SEQ ID NO: 11, wherein the anti-STAT6 ASO has a gapmer design.

[0439] In some aspects, the anti-STAT6 ASO targets a mRNA encoding a particular isoform of STAT6 protein (e.g., Isoform 1). In some aspects, the ASO targets all isoforms of STAT6 protein. In other aspects, the anti-STAT6 ASO targets two isoforms (e.g., Isoform 1 and Isoform 2, Isoform 1 and Isoform 3, or Isoform 2 and Isoform 3) of STAT6 protein.

[0440] In some aspects, a payload of the disclosure (e.g., ASO) hybridizes to a region within the introns of a STAT6 transcript. In certain aspects, the payload hybridizes to a region within the exons of a STAT6 transcript. In some aspects, the payload hybridizes to a region within the exon-intron junction of a STAT6 transcript. In some aspects, the payload hybridizes to a region within a STAT6 transcript (e.g., an intron, exon, or exon-intron junction). A non-limiting example of a payload (e.g., ASO) that can specifically target a region of a STAT6 transcript.

[0441] In some aspects, binding of an anti-STAT6 ASO targeting a STAT6 transcript disclosed herein to a mRNA transcript encoding STAT6 can reduce expression levels and/or activity levels of STAT6.

[0442] In some aspects, any anti-STAT6 ASO described herein can be part of an EV (e.g., exosome) of the present disclosure, i.e., an EV (e.g., exosome) a comprising construct comprising an optimized linker disclosed herein, e.g., a construct of Formula 1 where the biologically active moiety [BAM] is an anti-STAT6 ASO described herein or a combination thereof.

[0443] In some aspects, an anti-STAT6 ASO of the present disclosure comprises the base sequence of SEQ ID NO: 1091. In some aspects, an anti-STAT6 ASO of the present disclosure comprises the STAT 6 ASO sequence shown in FIG. 12.

### ASO Targeting MYC

[0444] In some aspects, the biologically active molecule [BAM] is an anti MYC ASO. Unless indicated otherwise, the term “MYC,” as used herein, can refer to MYC from one or more species (e.g., humans, non-human primates, dogs, cats, guinea pigs, rabbits, rats, mice, horses, cattle, and bears).

[0445] In some aspects, an anti-MYC ASO of the present disclosure comprises the base sequence of SEQ ID NO: 1092. In some aspects, and anti-MYC ASO of the present disclosure comprises the MYC ASO sequence shown in FIG. 12.

### ASO Targeting CEBP/β

[0446] In some aspects, the biologically active molecule [BAM] is an anti-CEBP/β ASO. Unless indicated otherwise, the term “CEBP/β,” as used herein, can refer to CEBP/β from one or more species (e.g., humans, non-human primates, dogs, cats, guinea pigs, rabbits, rats, mice, horses, cattle, and bears).

[0447] The sequence for the human CEBP/β gene can be found under publicly available GenBank Accession Number NC_000020.11 (50190583 . . . 50192690). The human CEBP/β gene is found at chromosome location 20q13.13 at 50190583-50192690.

[0448] The sequence for the human CEBP/β pre-mRNA transcript (SEQ ID NO: 21) corresponds to the reverse complement of residues 50190583-50192690 of chromosome 20q13.13. The CEBP/β mRNA sequence (GenBank Accession No. NM_001285878.1) is provided in SEQ ID NO: 23, except that the nucleotide “t” in SEQ ID NO: 23 is shown as “u” in the mRNA. The sequence for human CEBP/β protein can be found under publicly available Accession Numbers: P17676, (canonical sequence, SEQ ID NO: 22), P17676-2 (SEQ ID NO: 24), and P17676-3 (SEQ ID NO: 25), each of which is incorporated by reference herein in its entirety.

[0449] Natural variants of the human CEBP/β gene product are known. For example, natural variants of human CEBP/β protein can contain one or more amino acid substitutions selected from: A241P, A253G, G195S, and any combination thereof. Additional variants of human CEBP/β protein resulting from alternative splicing are also known in the art. CEBP/β Isoform 2 (identifier: P17676-2 at UniProt) differs from the canonical sequence (SEQ ID NO: 23) as follows: deletion of residues 1-23 relative to SEQ ID NO: 23. The sequence of CEBP/β Isoform 3 (identifier: P17676-3) differs from the canonical sequence (SEQ ID NO: 23) as follows: deletion of residues 1-198 relative to SEQ ID NO: 23. Therefore, the anti-CEBPb ASOs of the present disclosure can be designed to reduce or inhibit expression of the natural variants of the protein.

[0450] An example of a target nucleic acid sequence of the anti-CEBPb ASOs is CEBP/β pre-mRNA. SEQ ID NO: 21 represents a human CEBP/β genomic sequence (i.e., reverse complement of nucleotides 50190583-50192690 of chromosome 20q13.13). SEQ ID NO: 21 is identical to a CEBP/β pre-mRNA sequence except that nucleotide “t” in SEQ ID NO: 21 is shown as “u” in pre-mRNA. In certain aspects, the “target nucleic acid” comprises an intron of a CEBP/β protein-encoding nucleic acids or naturally occurring variants thereof, and RNA nucleic acids derived therefrom, e.g., pre-mRNA. In other aspects, the target nucleic acid comprises an exon region of a CEBP/β protein-encoding nucleic acids or naturally occurring variants thereof, and RNA nucleic acids derived therefrom, e.g., pre-mRNA. In yet other aspects, the target nucleic acid comprises an exon-intron junction of a CEBP/β protein-encoding nucleic acids or naturally occurring variants thereof, and RNA nucleic acids derived therefrom, e.g., pre-mRNA. The human CEBP/β protein sequence encoded by the CEBP/β pre-mRNA is shown as SEQ ID NO: 23. In other aspects, the target nucleic acid comprises an untranslated region of a CEBP/β protein-encoding nucleic acids or naturally occurring variants thereof, e.g., 5′ UTR, 3′ UTR, or both.

[0451] In some aspects, an anti-CEBPb ASO of the disclosure hybridizes to a region within the introns of a CEBP/β transcript, e.g., SEQ ID NO: 21. In certain aspects, an anti-CEBPb ASO of the disclosure hybridizes to a region within the exons of a CEBP/β transcript, e.g., SEQ ID NO: 21. In other aspects, an anti-CEBPb ASO of the disclosure hybridizes to a region within the exon-intron junction of a CEBP/β transcript, e.g., SEQ ID NO: 21. In some aspects, an anti-CEBPb ASO of the disclosure hybridizes to a region within a CEBP/β transcript (e.g., an intron, exon, or exon-intron junction), e.g., SEQ ID NO: 21, wherein the anti-CEBPb ASO has a gapmer design.

[0452] In some aspects, the anti-CEBPb ASO targets a mRNA encoding a particular isoform of CEBP/β protein (e.g., Isoform 1). In some aspects, the anti-CEBPb ASO targets all isoforms of CEBP/β protein. In other aspects, the anti-CEBPb ASO targets two isoforms (e.g., Isoform 1 and Isoform 2, Isoform 1 and Isoform 3, or Isoform 2 and Isoform 3) of CEBP/β protein.

[0453] In some aspects, binding of an anti-CEBPb ASO targeting a CEBPb transcript disclosed herein to a mRNA transcript encoding CEBPb can reduce expression levels and/or activity levels of CEBPb.

[0454] In some aspects, any anti-CEBPb ASO described herein can be part of an EV (e.g., exosome) of the present disclosure, i.e., an EV (e.g., exosome) a comprising construct comprising an optimized linker disclosed herein, e.g., a construct of Formula 1 where the biologically active moiety [BAM] is an anti-CEBPb ASO described herein or a combination thereof.

### ASO Targeting STAT3

[0455] In some aspects, the biologically active molecule [BAM] is an anti-STAT3 ASO. Signal Transducer and Activator of Transcription 3 (STAT3) is a signal transducer and activator of transcription that transmits signals from cell surface receptors to the nucleus. STAT3 is frequently hyperactivated in many human cancers.

[0456] Signal transducer and activator of transcription 3 (STAT3) is known in the art by various names. Such names include: DNA-binding protein APRF, and acute-phase response factor. The mRNA encoding human STAT3 can be found at Genbank Accession Number NM_003150.3, and is represented by the sequence (SEQ ID NO: 43).

[0457] Natural variants of the human STAT3 gene product are known. Therefore, the ASOs of the present disclosure can be designed to reduce or inhibit expression of the natural variants of the STAT3 protein.

[0458] SEQ ID NO: 41 is identical to a STAT3 pre-mRNA sequence except that nucleotide “t” in SEQ ID NO: 41 is shown as “u” in pre-mRNA. In certain aspects, the “target nucleic acid” comprises an intron of a STAT3 protein-encoding nucleic acids or naturally occurring variants thereof, and RNA nucleic acids derived therefrom, e.g., pre-mRNA. In other aspects, the target nucleic acid comprises an exon region of a STAT3 protein-encoding nucleic acids or naturally occurring variants thereof, and RNA nucleic acids derived therefrom, e.g., pre-mRNA. In yet other aspects, the target nucleic acid comprises an exon-intron junction of a STAT3 protein-encoding nucleic acids or naturally occurring variants thereof, and RNA nucleic acids derived therefrom, e.g., pre-mRNA. The human STAT3 protein sequence encoded by the STAT3 pre-mRNA is shown as SEQ ID NO: 42. In other aspects, the target nucleic acid comprises an untranslated region of a STAT3 protein-encoding nucleic acids or naturally occurring variants thereof, e.g., 5′ UTR, 3′ UTR, or both.

[0459] In yet other aspects, the target nucleic acid comprises an exon-intron junction of a STAT3 protein-encoding nucleic acids or naturally occurring variants thereof, and RNA nucleic acids derived therefrom, e.g., pre-mRNA. The human STAT3 protein sequence encoded by the STAT3 pre-mRNA is shown as SEQ ID NO: 43. In other aspects, the target nucleic acid comprises an untranslated region of a STAT3 protein-encoding nucleic acids or naturally occurring variants thereof, e.g., 5′ UTR, 3′ UTR, or both.

[0460] In some aspects, an anti-STAT3 ASO of the disclosure hybridizes to a region within the introns of a STAT3 transcript, e.g., SEQ ID NO: 41 or SEQ ID NO: 43. In certain aspects, an anti-STAT3 ASO of the disclosure hybridizes to a region within the exons of a STAT3 transcript, e.g., SEQ ID NO: 41 or SEQ ID NO: 43. In other aspects, an anti-STAT3 ASO of the disclosure hybridizes to a region within the exon-intron junction of a STAT3 transcript, e.g., SEQ ID NO: 41 or SEQ ID NO: 43. In some aspects, an anti-STAT3 ASO of the disclosure hybridizes to a region within a STAT3 transcript (e.g., an intron, exon, or exon-intron junction), e.g., SEQ ID NO: 41 or SEQ ID NO: 43, wherein the anti-STAT3 ASO has a gapmer design.

[0461] In some aspects, the anti-STAT3 ASO targets a mRNA encoding a particular isoform of STAT3 protein (e.g., Isoform 1). In some aspects, the ASO targets all isoforms of STAT3 protein. In other aspects, the ASO targets two isoforms (e.g., Isoform 1 (UniProt ID: P40763-1) and Isoform 2 (UniProt ID: P40763-2), Isoform 2 and Isoform 3 (UniProt ID: P40763-3) of STAT3 protein.

[0462] In some aspects, an anti-STAT3 ASO of the disclosure hybridizes to a region within the introns of a STAT3 transcript, e.g., SEQ ID NO: 41 or SEQ ID NO: 43. In certain aspects, an anti-STAT3 ASO of the disclosure hybridizes to a region within the exons of a STAT3 transcript, e.g., SEQ ID NO: 41 or SEQ ID NO: 43. In other aspects, an anti-STAT3 ASO of the disclosure hybridizes to a region within the exon-intron junction of a STAT3 transcript, e.g., SEQ ID NO: 41 or SEQ ID NO: 43. In some aspects, an anti-STAT3 ASO of the disclosure hybridizes to a region within a STAT3 transcript (e.g., an intron, exon, or exon-intron junction), e.g., SEQ ID NO: 41 or SEQ ID NO: 43, wherein the ASO has a gapmer design.

[0463] In some aspects, the anti-STAT3 ASO of the present disclosure hybridizes to multiple target regions within the STAT3 transcript (e.g., genomic sequence, SEQ ID NO: 41). In some aspects, the ASO hybridizes to two different target regions within the STAT3 transcript. In some aspects, the anti-STAT3 ASO hybridizes to three different target regions within the STAT3 transcript. In some aspects, the anti-STAT3 ASOs that hybridizes to multiple regions within the STAT3 transcript (e.g., genomic sequence, SEQ ID NO: 41) are more potent (e.g., having lower EC50) at reducing STAT3 expression compared to anti-STAT3 ASOs that hybridizes to a single region within the STAT3 transcript (e.g., genomic sequence, SEQ ID NO: 41).

[0464] The anti-STAT3 ASOs of the disclosure comprise a contiguous nucleotide sequence which corresponds to the complement of a region of STAT3 transcript, e.g., a nucleotide sequence corresponding to SEQ ID NO: 41.

[0465] In some aspects, binding of an anti-STAT3 ASO targeting a STAT3 transcript disclosed herein to a mRNA transcript encoding STAT3 can reduce expression levels and/or activity levels of STAT3.

[0466] In some aspects, any anti-STAT3 ASO described herein can be part of an EV (e.g., exosome) of the present disclosure, i.e., an EV (e.g., exosome) a comprising construct comprising an optimized linker disclosed herein, e.g., a construct of Formula 1 where the biologically active moiety [BAM] is an anti-STAT3 ASO described herein or a combination thereof.

### ASO Targeting NRAS

[0467] In some aspects, the biologically active molecule [BAM] is an anti-NRas ASO. NRas is an oncogene encoding a membrane protein that shuttles between the Golgi apparatus and the plasma membrane. NRas-encoding genomic DNA can be found at Chromosomal position 1p13.2 (i.e., nucleotides 5001 to 17438 of GenBank Accession No. NG_007572). Specifically, a combination of time-lapse microscopy and photobleaching techniques have revealed that in the absence of palmitoylation, GFP-tagged N-Ras undergoes rapid exchange between the cytosol and ER/Golgi membranes, and that wild-type GFP-N-Ras is recycled to the Golgi complex by a nonvesicular mechanism. N-ras mutations have been described in melanoma, thyroid carcinoma, teratocarcinoma, fibrosarcoma, neuroblastoma, rhabdomyosarcoma, Burkitt lymphoma, acute promyelocytic leukemia, T cell leukemia, and chronic myelogenous leukemia. Oncogenic N-Ras can induce acute myeloid leukemia (AML) or chronic myelomonocytic leukemia (CMML)-like disease in mice.

[0468] Neuroblastoma RAS viral oncogene (NRas) is known in the art by various names. Such names include: GTPase NRas, N-ras protein part 4, neuroblastoma RAS viral (v-ras) oncogene homolog neuroblastoma RAS viral oncogene homolog, transforming protein N-Ras, and v-ras neuroblastoma RAS viral oncogene homolog.

[0469] The NRAS gene provides instructions for making a protein called N-Ras that is involved primarily in regulating cell division. The mRNA sequence encoding human NRAS can be found at NCBI Reference sequence NM_002524.5 and is represented by the coding sequence (SEQ ID NO: 53).

[0470] Natural variants of the human NRas gene product are known. For example, natural variants of human NRas protein can contain one or more amino acid substitutions selected from: G12D, G13D, T50I, G60E, and any combinations thereof. Additional variants of human NRas protein resulting from alternative splicing are also known in the art, such as: G13R, Q61K, Q61R, and P34L. Therefore, the anti-NRas ASOs of the present disclosure can be designed to reduce or inhibit expression of the natural variants of the STAT3 protein.

[0471] SEQ ID NO: 51 is identical to a NRas pre-mRNA sequence except that nucleotide “t” in SEQ ID NO: 51 is shown as “u” in pre-mRNA. In certain aspects, the “target nucleic acid” comprises an intron of a NRas protein-encoding nucleic acids or naturally occurring variants thereof, and RNA nucleic acids derived therefrom, e.g., pre-mRNA. In other aspects, the target nucleic acid comprises an exon region of a NRas protein-encoding nucleic acids or naturally occurring variants thereof, and RNA nucleic acids derived therefrom, e.g., pre-mRNA. In yet other aspects, the target nucleic acid comprises an exon-intron junction of a NRas protein-encoding nucleic acids or naturally occurring variants thereof, and RNA nucleic acids derived therefrom, e.g., pre-mRNA. The human NRas protein sequence encoded by the NRas pre-mRNA is shown as SEQ ID NO: 52. In other aspects, the target nucleic acid comprises an untranslated region of a NRas protein-encoding nucleic acids or naturally occurring variants thereof, e.g., 5′ UTR, 3′ UTR, or both.

[0472] In certain aspects, the anti-NRas ASOs of the disclosure also are capable of down-regulating (e.g., reducing or removing) expression of the NRas mRNA or protein. In this regard, the anti-NRas ASO of the disclosure can affect indirect inhibition of NRas protein through the reduction in NRas mRNA levels, typically in a mammalian cell, such as a human cell, such as a tumor cell. In particular, the present disclosure is directed to anti-NRas ASOs that target one or more regions of the NRas pre-mRNA (e.g., intron regions, exon regions, and/or exon-intron junction regions). Unless indicated otherwise, the term “NRas,” as used herein, can refer to NRas from one or more species (e.g., humans, non-human primates, dogs, cats, guinea pigs, rabbits, rats, mice, horses, cattle, and bears).

[0473] In some aspects, an anti-NRas ASO of the disclosure hybridizes to a region within the introns of a NRAS transcript, e.g., SEQ ID NO: 51 or SEQ ID NO: 53. In certain aspects, an ASO of the disclosure hybridizes to a region within the exons of a NRAS transcript, e.g., SEQ ID NO: 51 or SEQ ID NO: 53. In other aspects, an ASO of the disclosure hybridizes to a region within the exon-intron junction of a NRAS transcript, e.g., SEQ ID NO: 51 or SEQ ID NO: 53. In some aspects, an anti-NRas ASO of the disclosure hybridizes to a region within a NRAS transcript (e.g., an intron, exon, or exon-intron junction), e.g., SEQ ID NO: 51 or SEQ ID NO: 53, wherein the ASO has a gapmer design.

[0474] In some aspects, the anti-NRas ASO of the present disclosure hybridizes to multiple target regions within the NRas transcript (e.g., genomic sequence, SEQ ID NO: 51). In some aspects, the anti-NRas ASO hybridizes to two different target regions within the NRas transcript. In some aspects, the anti-NRas ASO hybridizes to three different target regions within the NRas transcript. In some aspects, the anti-NRas ASOs that hybridizes to multiple regions within the NRas transcript (e.g., genomic sequence, SEQ ID NO: 51) are more potent (e.g., having lower EC50) at reducing NRas expression compared to anti-NRas ASOs that hybridizes to a single region within the NRas transcript (e.g., genomic sequence, SEQ ID NO: 51).

[0475] In some aspects, the ASO targets a mRNA encoding a particular isoform of NRAS protein (e.g., Isoform 1, NCBI ID: NP_001229821.1). In some aspects, the ASO targets all isoforms of NRas protein. In other aspects, the ASO targets two isoforms (e.g., Isoform 1 and Isoform 2 (NCBI ID:NP_009089.4), Isoform 2 and Isoform 3 (NCBI ID: NP_001123995), and Isoform 3 and Isoform 4 (NCBI ID: NP_001229820.1)) of NRas protein.

[0476] The anti-NRas ASOs of the disclosure comprise a contiguous nucleotide sequence which corresponds to the complement of a region of NRas transcript, e.g., a nucleotide sequence corresponding to SEQ ID NO: 51.

[0477] In some aspects, binding of an anti-NRas ASO targeting a NRas transcript disclosed herein to a mRNA transcript encoding NRas can reduce expression levels and/or activity levels of NRas.

[0478] In some aspects, any anti-NRas ASO described herein can be part of an EV (e.g., exosome) of the present disclosure, i.e., an EV (e.g., exosome) a comprising construct comprising an optimized linker disclosed herein, e.g., a construct of Formula 1 where the biologically active moiety [BAM] is an anti-NRas ASO described herein or a combination thereof.

### ASO Targeting KRAS

[0479] In some aspects, the biologically active molecule [BAM] is an anti-KRAS ASO. The sequence for the human KRAS gene can be found at chromosomal location 12p12.1 and under publicly available GenBank Accession Number NC_000012 (25,204,789-25,250,936). The genomic sequence for human wild-type KRAS transcript corresponds to the reverse complement of residues 25,204,789-25,250,936 of NC_000012 (SEQ ID NO: 35). The KRAS G12D) genomic sequence provided in SEQ ID NO: 31 differs from SEQ ID NO: 35 in that it has a guanine to adenine substitution at nucleotide position 5,587. An exemplary KRAS G12D mRNA sequence is provided in SEQ ID NO: 33, except that the nucleotide “t” in SEQ ID NO: 33 is shown as “u” in the mRNA. The KRAS G12D) mRNA provided in SEQ ID NO: 33 differs from the wild-type mRNA sequence (e.g., GenBank Accession No. NM_004985.5; SEQ ID NO: 37) in that it has a guanine to adenine substitution at nucleotide position 225. The sequence for human KRAS protein can be found under publicly available Accession Numbers: P01116 (canonical sequence), A8K8Z5, B0LPF9, P01118, and Q96D10, each of which is incorporated by reference herein in its entirety.

[0480] There are two isoforms of the human KRAS protein (P01116), resulting from alternative splicing. Isoform 2A (Accession Number: P01116-1; SEQ ID NO: 38) is the canonical sequence. It is also known as K-Ras4A. Isoform 2B (Accession Number: P01116-2; also known as K-Ras4B; SEQ ID NO: 36) differs from the canonical sequence as follows: (i) 151-153: RVE→GVD; and (ii) 165-189: QYRLKKISKEEKTPGCVKIKKCIIM (SEQ ID NO:599)→KHKEKMSKDGKKKKKKSKTKCVIM (SEQ ID NO:600). In some aspects, anti-KRAS ASOs disclosed herein can reduce or inhibit expression of KRAS protein Isoform 2A, Isoform 2B, or both.

[0481] Natural variants of the human KRAS gene product are known. For example, natural variants of human KRAS protein can contain one or more amino acid substitutions selected from: K5E, K5N, G10GG, G10V, G12A, G12C, G12F, G12I, G12L, G12R, G12S, G12V, G13C, G13D, G13E, G13R, G13V, V14I, L19F, T20M, Q22E, Q22H, Q22K, Q22R, Q25H, N26Y, F28L, E31K, D33E, P34L, P34Q, P34R, 136M, R41K, D57N, T58I, A59T, G60D, G60R, G60S, G60V, Q61A, Q61H, Q61K, Q61L, Q61P, Q61R, E63K, S65N, R68S, Y71H, T74A, L79I, R97I, Q99E, M111L, K117N, K117R, D119G, S122F, T144P, A146P, A146T, A146V, K147E, K147T, R149K, L159S, 1163S, R164Q, 1183N, 184M, or combinations thereof. Natural variants that are specific to KRAS protein Isoform 2B contain one or more amino acid substitutions selected from: V152G, D153V, F156I, F156L, or combinations thereof. The anti-KRAS ASOs of the present disclosure can be designed to reduce or inhibit expression of one or more of the variants of the KRAS protein (e.g., any variants known in the art). In some aspects, a KRAS mutant has an amino acid substitution of G12D. In some aspects, the anti-KRAS ASOs of the present disclosure target one or more KRAS mutants. In other aspects, a KRAS mutant that the anti-KRAS ASOs target is KRAS G12D (SEQ ID NO: 32). Exemplary sequences for KRAS G12D mRNA and KRAS G12D protein are provided in SEQ ID NO: 33 and SEQ ID NO: 32.

[0482] In some aspects, a target nucleic acid sequence of an anti-KRAS ASO disclosed herein comprises one or more regions of a KRAS pre-mRNA. For example, SEQ ID NO: 31 (described above) is identical to a KRAS pre-mRNA sequence except that nucleotide “t” in SEQ ID NO: 31 is shown as “u” in the pre-mRNA. As used herein, the term “target nucleic acid sequence” refers to a nucleic acid sequence that is complementary to an anti-KRAS ASO disclosed herein. In certain aspects, the target nucleic acid sequence comprises an exon region of a KRAS protein-encoding nucleic acids or naturally occurring variants thereof, and RNA nucleic acids derived therefrom, e.g., pre-mRNA. In some aspects, the target nucleic acid sequence comprises an intron of a KRAS protein-encoding nucleic acids or naturally occurring variants thereof, and RNA nucleic acids derived therefrom, e.g., pre-mRNA. In further aspects, the target nucleic acid sequence comprises an exon-intron junction of a KRAS protein-encoding nucleic acids or naturally occurring variants thereof, and RNA nucleic acids derived therefrom, e.g., pre-mRNA. In some aspects, for example, when used in research or diagnostics, the target nucleic acid can be a cDNA or a synthetic oligonucleotide derived from DNA or RNA nucleic acid targets described herein. In some aspects, the target nucleic acid comprises an untranslated region of a KRAS protein-encoding nucleic acids or naturally occurring variants thereof, e.g., 5′ UTR, 3′ UTR, or both.

[0483] Accordingly, in some aspects, an anti-KRAS ASO disclosed herein hybridizes to an exon region of a KRAS transcript, e.g., SEQ ID NO: 31 or SEQ ID NO: 33. In some aspects, an anti-KRAS ASO of the present disclosure hybridizes to an intron region of a KRAS transcript, e.g., SEQ ID NO: 31. In some aspects, an anti-KRAS ASO hybridizes to an exon-intron junction of a KRAS transcript, e.g., SEQ ID NO: 31. In some aspects, an anti-KRAS ASO of the present disclosure hybridizes to a region within a KRAS transcript (e.g., an intron, exon, or exon-intron junction), e.g., SEQ ID NO: 31.

[0484] In some aspects, a target nucleic sequence of the ASOs disclosed herein is a KRAS mRNA, e.g., SEQ ID NO: 33. Accordingly, in certain aspects, an anti-KRAS ASO disclosed herein can hybridize to one or more regions of a KRAS mRNA. In some aspects, anti-KRAS ASOs of the present disclosure target mRNA encoding a particular isoform of KRAS protein. In certain aspects, anti-KRAS ASOs disclosed herein can target all isoforms of KRAS protein, including any variants thereof (e.g., those described herein). In some aspects, a KRAS protein that can be targeted by anti-KRAS ASOs of the present disclosure comprises a G12D amino acid substitution.

[0485] In some aspects, binding of an anti-KRAS ASO targeting a KRAS transcript disclosed herein to a mRNA transcript encoding KRAS can reduce expression levels and/or activity levels of KRAS.

[0486] In some aspects, any anti-KRAS ASO described herein can be part of an EV (e.g., exosome) of the present disclosure, i.e., an EV (e.g., exosome) a comprising construct comprising an optimized linker disclosed herein, e.g., a construct of Formula 1 where the biologically active moiety [BAM] is an anti-KRAS ASO described herein or a combination thereof.

### ASO Targeting Pmp22

[0487] In some aspects, the biologically active molecule [BAM] is an anti-Pmp22 ASO. Peripheral myelin protein 22 (PMP22) is also known as growth arrest-specific protein 3 (GAS-3), is encoded by the PMP22 gene. PMP22 is a 22 kDa transmembrane glycoprotein made up of 160 amino acids, and is mainly expressed in the Schwann cells of the peripheral nervous system. Schwann cells show high expression of PMP22, where it can constitute 2-5% of total protein content in compact myelin. Compact myelin is the bulk of the peripheral neuron's myelin sheath, a protective fatty layer that provides electrical insulation for the neuronal axon. The level of PMP22 expression is relatively low in the central nervous system of adults.

[0488] PMP22 plays an essential role in the formation and maintenance of compact myelin. When Schwann cells come into contact with a neuronal axon, expression of PMP22 is significantly up-regulated, whereas PMP22 is down-regulated during axonal degeneration or transection. PMP22 has shown association with zonula-occludens 1 and occludin, proteins that are involved in adhesion with other cells and the extracellular matrix, and also support functioning of myelin. Along with cell adhesion function, PMP22 is also up-regulated during Schwann cell proliferation, suggesting a role in cell-cycle regulation. PMP22 is detectable in non-neural tissues, where its expression has been shown to serve as growth-arrest-specific (gas-3) function.

[0489] Improper gene dosage of the PMP22 gene can cause aberrant protein synthesis and function of myelin sheath. Since the components of myelin are stoichiometrically set, any irregular expression of a component can cause destabilization of myelin and neuropathic disorders. Alterations of PMP22 gene expression are associated with a variety of neuropathies, such as Charcot-Marie-Tooth type 1A (CMT1A), Dejerine-Sottas disease, and Hereditary Neuropathy with Liability to Pressure Palsy (HNPP). Too much PMP22 (e.g. caused by gene duplication) results in CMT1A. Gene duplication of PMP22 is the most common genetic cause of CMT where the overproduction of PMP22 results in defects in multiple signaling pathways and dysfunction of transcriptional factors like KNOX20, SOX10 and EGR2.

[0490] The sequence for the human PMP22 gene can be found under publicly available as NCBI RefSeq Acc. No. NM_000304. Alternative RefSeq mRNA transcripts have accession numbers NM_001281455, NM-001281456, NM-153321, and NM_153322, respectively. The human PMP22 gene is found at chromosome location 17p12 at 15,229,777-15,265,326.

[0491] The sequence for the human PMP22 pre-mRNA transcript (SEQ ID NO: 264) corresponds to the reverse complement of residues 15,229,777-15,265,326, of chromosome location 17p12. The PMP22 mRNA sequence (GenBank Accession No. NM_000304.4) is provided in SEQ ID NO: 58. The sequence for human PMP22 protein can be found under publicly available Uniprot Accession Number Q01453 (canonical sequence, SEQ ID NO: 60). Potential PMP22 isoforms have Uniprot Accession Numbers A8MU75, J3KQW0, A0A2R8Y5L5, J3KT36, and J3QS08, respectively. The publicly available contents of the database entries corresponding to accession numbers disclosed herein are incorporated by reference in their entireties.

[0492] The anti-PMP22 ASOs of the present disclosure can be designed to reduce or inhibit expression of the natural variants of the PMP22 protein.

[0493] An example of a target nucleic acid sequence of the anti-PMP22 ASOs is PMP22 pre-mRNA. SEQ ID NO: 58 represents a human PMP22 genomic sequence (i.e., reverse complement of nucleotides 15,229,777-15,265,326, complement, of chromosome 17p12). SEQ ID NO: 58 is identical to a PMP22 pre-mRNA sequence except that nucleotide “t” in SEQ ID NO: 58 is shown as “u” in pre-mRNA.

[0494] In some aspects, the anti-PMP22 ASO comprises a contiguous nucleotide sequence of 10 to 30 nucleotides in length that is complementary to a nucleic acid sequence within nucleotides 1 to 1828 of a PMP22 transcript corresponding to a nucleotide sequence as set forth in SEQ ID NO: 264 (PMP22 full mRNA transcript) or nucleotides 208 to 690 of a PMP22 transcript corresponding to a nucleotide sequence as set forth in SEQ ID NO: 59 (PMP22 coding sequence).

[0495] In some aspects, the contiguous nucleotide sequence is at least about 80%, at least about 85%, at least about 90%, at least about 95%, or about 100% complementary to the nucleic acid sequence within the PMP22 transcript. In some aspects, the anti-PMP22 ASO is capable of reducing PMP22 protein expression in a human cell (e.g., a Schwan cell), wherein the human cell expresses the PMP22 protein.

[0496] In some aspects, the PMP22 protein expression is reduced by at least about 30%, at least about 35%, at least about 40%, at least about 45%, at least about 50%, at least about 55%, at least about 60%, at least about 65%, at least about 70%, at least about 75%, at least about 80%, at least about 85%, at least about 90%, at least about 95%, or about 100% compared to PMP22 protein expression in a human cell that is not exposed to the anti-PMP22 ASO.

[0497] In some aspects, the anti-PMP22 ASO is capable of reducing a level of PMP22 mRNA in a human cell (e.g., an immune cell), wherein the human cell expresses the PMP22 mRNA. In some aspects, the level of PMP22 mRNA is reduced by at least about 30%, at least about 35%, at least about 40%, at least about 45%, at least about 50%, at least about 55%, at least about 60%, at least about 65%, at least about 70%, at least about 75%, at least about 80%, at least about 85%, at least about 90%, at least about 95%, or about 100% compared to the level of the PMP22 mRNA in a human cell that is not exposed to the anti-PMP22 ASO.

[0498] In certain aspects, the target nucleic acid comprises an intron of a PMP22 protein-encoding nucleic acids or naturally occurring variants thereof, and RNA nucleic acids derived therefrom, e.g., pre-mRNA. In other aspects, the target nucleic acid comprises an exon region of a PMP22 protein-encoding nucleic acids or naturally occurring variants thereof, and RNA nucleic acids derived therefrom, e.g., pre-mRNA. In yet other aspects, the target nucleic acid comprises an exon-intron junction of a PMP22 protein-encoding nucleic acids or naturally occurring variants thereof, and RNA nucleic acids derived therefrom, e.g., pre-mRNA. In some aspects, for example when used in research or diagnostics the target nucleic acid can be a cDNA or a synthetic oligonucleotide derived from the above DNA or RNA nucleic acid targets. The human PMP22 coding sequence (CDS) is shows as SEQ ID NO: 59, and protein sequence encoded by the coding sequence in the PMP22 pre-mRNA is shown as SEQ ID NO: 60. In other aspects, the target nucleic acid comprises an untranslated region of a PMP22 protein-encoding nucleic acids or naturally occurring variants thereof, e.g., 5′ UTR, 3′ UTR, or both.

[0499] In some aspects, an anti-PMP22 ASO of the disclosure hybridizes to a region within the introns of a PMP22 transcript, e.g., SEQ ID NO: 58. In certain aspects, an ASO of the disclosure hybridizes to a region within the exons of a PMP22 transcript, e.g., SEQ ID NO: 58. In other aspects, an anti-PMP22 ASO of the disclosure hybridizes to a region within the exon-intron junction of a PMP22 transcript, e.g., SEQ ID NO: 58.

[0500] In some aspects, any anti-PMP22 ASO described herein can be part of an EV (e.g., exosome) of the present disclosure, i.e., an EV (e.g., exosome) a comprising construct comprising an optimized linker disclosed herein, e.g., a construct of Formula 1 where the biologically active moiety [BAM] is an anti-PMP22 ASO described herein or a combination thereof.

### Extracellular Vesicle (EV), e.g., Exosome

[0501] The constructs comprising an optimized linker disclose herein, e.g., the constructs of Formula 1, can comprise at least one anchoring moiety [AM] that attaches the construct to an Extracellular Vesicle (EV), e.g., an exosome. The EVs (e.g., exosomes) of the present disclosure can have a diameter between about 20 and about 300 nm. In certain aspects, an EV (e.g., exosome) of the present disclosure has a diameter between about 20 to about 290 nm, about 20 to about 280 nm, about 20 to about 270 nm, about 20 to about 260 nm, about 20 to about 250 nm, about 20 to about 240 nm, about 20 to about 230 nm, about 20 to about 220 nm, about 20 to about 210 nm, about 20 to about 200 nm, about 20 to about 190 nm, about 20 to about 180 nm, about 20 to about 170 nm, about 20 to about 160 nm, about 20 to about 150 nm, about 20 to about 140 nm, about 20 to about 130 nm, about 20 to about 120 nm, about 20 to about 110 nm, about 20 to about 100 nm, about 20 to about 90 nm, about 20 to about 80 nm, about 20 to about 70 nm, about 20 to about 60 nm, about 20 to about 50 nm, about 20 to about 40 nm, or about 20 to about 30 nm. The size of the EV (e.g., exosome) described herein can be measured according to methods known in the art.

[0502] EVs (e.g., exosomes) of the present disclosure comprise a bi-lipid membrane (“exosome membrane” or “EV membrane”), comprising an interior surface (luminal surface) and an exterior surface. The interior surface faces the inner core of the EV (e.g., exosome), i.e., the lumen of the EV.

[0503] The EV or exosome membrane comprises lipids and fatty acids. Exemplary lipids comprise phospholipids, glycolipids, fatty acids, sphingolipids, phosphoglycerides, sterols, cholesterols, and phosphatidylserines. The EV or exosome membrane comprises an inner leaflet and an outer leaflet. The composition of the inner and outer leaflet can be determined by transbilayer distribution assays known in the art, see, e.g., Kuypers et al., Biohim Biophys Acta 1985 819:170.

[0504] In some aspects, the composition of the outer leaflet is between about 70% and about 90% choline phospholipids, between about 0% and about 15% acidic phospholipids, and between about 5% and about 30% phosphatidylethanolamine. In some aspects, the composition of the inner leaflet is between about 15% and about 40% choline phospholipids, between about 10% and about 50% acidic phospholipids, and between about 30% and about 60% phosphatidylethanolamine. In some aspects, the EV or exosome membrane comprises one or more polysaccharides, such as glycan. Glycans on the surface of the EV or exosomes can serve as an attachment to a maleimide moiety or a linker that connect the glycan and a maleimide moiety. The glycan can be present on one or more proteins on the surface of an EV (e.g., exosome), for example, a Scaffold X, such as a PTGFRN polypeptide, or on the lipid membrane of the EV (e.g., exosome). Glycans can be modified to have thiofucose that can serve as a functional group for attaching a maleimide moiety to the glycans. In some aspects, the Scaffold X can be modified to express a high number of glycan to allow additional attachments on the EV (e.g., exosome).

### Methods of Making

[0505] EVs (e.g., exosomes) of the present disclosure can be produced by chemical synthesis, recombinant DNA technology, biochemical or enzymatic fragmentation of larger molecules, combinations of the foregoing or by any other method. In one aspect, the present disclosure provides a method of attaching a biologically active molecule to an EV (e.g., exosome) via an optimized link disclosed herein, e.g., via solid phase synthesis or conjugation.

[0506] Exosome production: In some aspects, EVs disclosed herein (e.g., exosomes) can be produced from a cell grown in vitro or a body fluid of a subject. When exosomes are produced from in vitro cell culture, various producer cells, e.g., HEK293 cells, CHO cells, and MSCs, can be used. In certain aspects, the producer cell is HEK293 cells. In some aspects, a producer cell is not a dendritic cell, macrophage, B cell, mast cell, neutrophil, Kupffer-Browicz cell, cell derived from any of these cells, or any combination thereof.

[0507] Human embryonic kidney 293 cells, also often referred to as HEK 293, HEK-293, 293 cells, or less precisely as HEK cells, are a specific cell line originally derived from human embryonic kidney cells grown in tissue culture.

[0508] HEK 293 cells were generated in 1973 by transfection of cultures of normal human embryonic kidney cells with sheared adenovirus 5 DNA in Alex van der Eb's laboratory in Leiden, the Netherlands. The cells were cultured and transfected by adenovirus. Subsequent analysis has shown that the transformation was brought about by inserting˜4.5 kilobases from the left arm of the viral genome, which became incorporated into human chromosome 19.

[0509] A comprehensive study of the genomes and transcriptomes of HEK 293 and five derivative cell lines compared the HEK 293 transcriptome with that of human kidney, adrenal, pituitary and central nervous tissue. The HEK 293 pattern most closely resembled that of adrenal cells, which have many neuronal properties. HEK 293 cells have a complex karyotype, exhibiting two or more copies of each chromosome and with a modal chromosome number of 64. They are described as hypotriploid, containing less than three times the number of chromosomes of a haploid human gamete. Chromosomal abnormalities include a total of three copies of the X chromosome and four copies of chromosome 17 and chromosome 22. Variants of HEK293 cells useful to produce EVs include, but are not limited to, HEK 293F, HEK 293FT, and HEK 293T.

[0510] Solid-phase synthesis: Solid phase synthesis known in the art may additionally or alternatively be employed to generate the constructs disclosed in the present application. In some aspects, two or more components of an optimized linker disclosed herein can be attached to each other (e.g., concatenated) using solid phase synthesis. For example, an ASO can be synthesized, and different spacers or combinations thereof can be added to the ASO via conventional synthetic steps. Examplary phosphoramidite spacers (e.g., C3-phosphoramidite, TEG-phosphoramidite, and HEG-phosphoramidite) are presented in FIG. 4. In some aspects, the spacer or combination of spacers can be further extended via synthesis to incorporate the membrane anchor moiety, as exemplified in FIG. 3, which shows phosphoramidites that can be used to generate the optimized linkers of the present disclosure via solid phase synthesis such as octyl-tocopherol phosphoramidite, tocopherol phosphoramidite, palmitate-C6 phosphoramidite, cholesterol-TEG phosphoramidite or or cholesterol-C6 phosphoramidite. Suitable solid phase techniques, including automated synthesis techniques, are described, e.g., in F. Eckstein (ed.), Oligonucleotides and Analogues, a Practical Approach, Oxford University Press, New York (1991) and Toy, P. H.; Lam, Y (ed.), Solid-Phase Organic synthesis, concepts, Strategies, and Applications, John Wiley & Sons, Inc. New Jersey (2012).

[0511] Conjugation: In some aspects, two or more components of an optimized linker disclosed herein can be attached to each other (e.g., concatenated) using conjugation. Besides amine-reactive compounds, those having chemical groups that form bonds with sulfhydryls (—SH) are the most common crosslinkers and modification reagents for protein and other bioconjugate techniques. Sulfhydryls, also called thiols, exist in proteins in the side-chain of cysteine (Cys, C) amino acids. Pairs of cysteine sulfhydryl groups are often linked by disulfide bonds (—S—S—) within or between polypeptide chains as the basis of native tertiary or quaternary protein structure. Typically, only free or reduced sulfhydryl groups (—SH) [rather than sulfur atoms in disulfide bonds] are available for reaction with thiol-reactive compounds.

[0512] Sulfhydryl groups are useful targets for protein conjugation and labeling. First, sulfhydryls are present in most proteins but are not as numerous as primary amines; thus, crosslinking via sulfhydryl groups is more selective and precise. Second, sulfhydryl groups in proteins are often involved in disulfide bonds, so crosslinking at these sites typically does not significantly modify the underlying protein structure or block binding sites. Third, the number of available (i.e., free) sulfhydryl groups can be easily controlled or modified; they can be generated by reduction of native disulfide bonds, or they can be introduced into molecules through reaction with primary amines using sulfhydryl-addition reagents, such as 2-iminothiolane (Traut's Reagent), SATA, SATP, or SAT(PEG). Finally, combining sulfhydryl-reactive groups with amine-reactive groups to make heterobifunctional crosslinkers provides greater flexibility and control over crosslinking procedures. For example, using 3-maleimido-propionic NHS ester, which contains a maleimide group and an NHS ester, the NHS ester can be used to label the primary amines (—NH2) of proteins, amine-modified oligonucleotides, and other amine-containing molecules. The maleimide group will react with a thiol group to form a covalent bond, enabling the connection of biomolecule with a thiol.

[0513] The maleimide group reacts specifically with sulfhydryl groups when the pH of the reaction mixture is between 6.5 and 7.5; the result is formation of a stable thioether linkage that is not reversible (i.e., the bond cannot be cleaved with reducing agents). In more alkaline conditions (pH>8.5), the reaction favors primary amines and also increases the rate of hydrolysis of the maleimide group to a non-reactive maleamic acid. Maleimides do not react with tyrosines, histidines or methionines.

[0514] Thiol-containing compounds, such as dithiothreitol (DTT) and beta-mercaptoethanol (BME), must be excluded from reaction buffers used with maleimides because they will compete for coupling sites. For example, if DTT were used to reduce disulfides in a protein to make sulfhydryl groups available for conjugation, the DTT would have to be thoroughly removed using a desalting column before initiating the maleimide reaction. Interestingly, the disulfide-reducing agent TCEP does not contain thiols and does not have to be removed before reactions involving maleimide reagents.

[0515] Excess maleimides can be quenched at the end of a reaction by adding free thiols. EDTA can be included in the coupling buffer to chelate stray divalent metals that otherwise promote oxidation of sulfhydryls (non-reactive).

[0516] In one aspect, the linking comprises treating the EV (e.g., exosome) with a reducing agent. Suitable reducing agents include, for example, TCEP (Tris(2-carboxyethyl)phosphine), DTT (dithiothreitol), BME (2-mercaptoethanol), a thiolating agent, and any combination thereof. The thiolating agent can comprise, e.g., Traut's reagent (2-iminothiolane).

[0517] After the treatment with the reducing agent, the linking reaction further comprises bringing the reduced EV (e.g., exosome) in contact with the maleimide moiety. In one aspect, the maleimide moiety is linked to a biologically active molecule prior to the linking to the EV (e.g., exosome). In some aspects, the maleimide moiety is further attached to a linker to connect the maleimide moiety to the biologically active molecule. Accordingly, in some aspects, one or more linkers or spacers are interposed between the maleimide moiety and the biologically active molecule.

[0518] Any of the anchoring moieties [AM], spacer [SP] or spacer combinations, or biologically active molecules [BAM] disclosed herein can be conjugated to a reactive moiety, e.g., an amino reactive moiety (e.g., NHS-ester, p-nitrophenol, isothiocyanate, isocyanate, or aldehyde), a thiol reactive moiety (e.g., acrylate, maleimide, or pyridyl disulfide), a hydroxy reactive moiety (e.g., isothiocyanate or isocyanate), a carboxylic acid reactive moiety (e.g., epoxide), or an azide reactive moiety (e.g., alkyne).

[0519] Exemplary reactive moieties that can be used to covalent bind two components disclosed herein (e.g., an anchoring moiety [AM] and a spacer [SP], two spacers [SP], a spacer [SP] and a biologally active molecule [BAM], or an anchoring moiety [AM] and a biologically active moiety [BAM]) via chemical conjugation include, e.g., N-succinimidyl-3-(2-pyridyldithio)propionate, N-4-maleimide butyric acid, S-(2-pyridyldithio)cysteamine, iodoacetoxysuccinimide, N-(4-maleimidebutyryl oxy)succinimide, N-[5-(3′-maleimide propylamide)-1-carboxypentyl]iminodiacetic acid, N-(5-aminopentyl)iminodiacetic acid, and 1′-[(2-cyanoethyl)-(N,N-diisopropyl)]-phosphoramidite). Bifunctional linkers (linkers containing two functional groups) are also usable.

[0520] In some aspects, an anchoring moiety [AM], spacer [SP], or biologically active molecule [BAM] can comprise a terminal oxyamino group, e.g., —ONH₂, a hydrazino group, —NHNH₂, a mercapto group (i.e., SH or thiol), or an olefin (e.g., CH═CH₂). In some aspects, an anchoring moiety [AM], spacer [SP], or biologically active molecule [BAM] can comprise an electrophilic moiety, e.g., at a terminal position, e.g., an aldehyde, alkyl halide, mesylate, tosylate, nosylate, or brosylate, or an activated carboxylic acid ester, e.g. an NHS ester, a phosphoramidite, or a pentafluorophenyl ester. In some aspects, a covalent bond can be formed by coupling a nucleophilic group of a ligand, e.g., a hydroxyl, a thiol or amino group, with an electrophilic group The present invention is amenable to all manner of reactive groups and reactive moieties including but not limited to those known in the art.

[0521] The term “protecting group,” as used herein, refers to a labile chemical moiety which is known in the art to protect reactive groups including without limitation, hydroxyl, amino and thiol groups, against undesired reactions during synthetic procedures. Protecting groups are typically used selectively and/or orthogonally to protect sites during reactions at other reactive sites and can then be removed to leave the unprotected group as is or available for further reactions. Protecting groups as known in the art are described generally in Greene and Wuts, Protective Groups in Organic Synthesis, 3rd edition, John Wiley & Sons, New York (1999).

[0522] Additionally, the various synthetic steps may be performed in an alternate sequence or order to give the desired compounds. Synthetic chemistry transformations and protecting group methodologies (protection and deprotection) useful in synthesizing the compounds described herein are known in the art and include, for example, those such as described in R. Larock, Comprehensive Organic Transformations, VCH Publishers (1989); T. W. Greene and P. G. M. Wuts, Protective Groups in Organic Synthesis, 2d. Ed., John Wiley and Sons (1991); L. Fieser and M. Fieser, Fieser and Fieser's Reagents for Organic Synthesis, John Wiley and Sons (1994); and L. Paquette, ed., Encyclopedia of Reagents for Organic Synthesis, John Wiley and Sons (1995), and subsequent editions thereof.

[0523] Amine reactive moieties: In some aspects, the reactive moiety is an amine reactive moiety. As used herein the term “amine reactive moiety” refers to a chemical group which can react with a reactive group having an amino moiety, e.g., primary amines. Exemplary amine reactive moieties are N-hydroxysuccinimide esters (NHS-ester), p-nitrophenol, isothiocyanate, isocyanate, and aldehyde. Alternative reactive moieties that react with primary amines are also well known in the art. In some aspects, an amine reactive moiety can be attached to a terminal position of an anchoring moiety [AM], spacer [SP], or biologically active molecule [BAM] of the present disclosure. In some aspects, the amine reactive moiety is a NHS-ester. Typically, a NHS-ester reactive moiety reacts with a primary amine of a reactive group to yield a stable amide bond and N-hydroxysuccinimide (NHS). In some aspects, the amine reactive moiety is a p-nitrophenol group. Typically, a p-nitrophenol reactive moiety is an activated carbamate that reacts with a primary amine of a reactive group to yield a stable carbamate moiety and p-nitrophenol. In some aspects, the amine reactive moiety is an isothiocyanate. Typically, an isothiocyanate reacts with a primary amine of a reactive group to yield a stable thiourea moiety. In some aspects, the amine reactive moiety is an isocyanate. Typically, an isocyanate reacts with a primary amine of a reactive group to yield a stable urea moiety. In some aspects, amine the reactive moiety is an aldehyde. Typically, aldehydes react with primary amines to form Schiff bases which can be further reduced to form a covalent bond through reductive amination.

[0524] Thiol reactive moieties: In some aspects, the reactive moiety is a thiol reactive moiety. As used herein the term “thiol reactive moiety” refers to a chemical group which can react with a reactive group having a thiol moiety (or mercapto group). Exemplary thiol reactive moieties are acrylates, maleimides, and pyridyl disulfides. Alternative reactive moieties that react with thiols are also well known in the art. In some aspects, a thiol reactive moiety can be attached to a terminal position of an anchoring moiety [AM], spacer [SP], or biologically active molecule [BAM] of the present disclosure. In some aspects, the thiol reactive moiety is an acrylate. Typically, acrylates react with thiols at the carbon B to the carbonyl of the acrylate to form a stable sulfide bond. In some aspects, the thiol reactive moiety is a maleimide. Typically, maleimides react with thiols at either the carbon B or the carbonyls to form a stable sulfide bond. In some aspects, the thiol reactive moiety is a pyridyl disulfide. Typically, pyridyl disulfides react with thiols at the sulfur atom B to the pyridyl to form a stable disulfide bond and pyridine-2-thione.

[0525] Hydroxy reactive moieties: In some aspects, the reactive moiety is a hydroxyl reactive moiety. As used herein the term “hydroxyl reactive moiety” refers to a chemical group which can react with a reactive group having a hydroxyl moiety. Exemplary hydroxyl reactive moieties are isothiocyanates and isocyanates. Alternative reactive moieties that react with hydroxyl moieties are also well known in the art. In some aspects, a hydroxyl reactive moiety can be attached to a terminal position of an anchoring moiety [AM], spacer [SP], or biologically active molecule [BAM] of the present disclosure. In some aspects, the hydroxyl reactive moiety is an isothiocyanate. Typically, an isothiocyanate reacts with a hydroxyl of a reactive group to yield a stable carbamothioate moiety. In some aspects, amine the reactive moiety is an isocyanate. Typically, an isocyanate reacts with a hydroxyl of a reactive group to yield a stable carbamate moiety.

[0526] Carboxylic acid reactive moieties: In some aspects, the reactive moiety is a carboxylic acid reactive moiety. As used herein the term “carboxylic acid reactive moiety” refers to a chemical group which can react with a reactive group having a carboxylic acid moiety. An exemplary carboxylic acid reactive moiety is an epoxide. Alternative reactive moieties that react with carboxylic acid moieties are also well known in the art. In some aspects, a carboxylic acid reactive moiety can be attached to a terminal position of an anchoring moiety [AM], spacer [SP], or biologically active molecule [BAM] of the present disclosure. In some aspects, the carboxylic acid reactive moiety is an epoxide. Typically, an epoxide reacts with the carboxylic acid of a reactive group at either of the carbon atoms of the epoxide to form a 2-hydroxyethyl acetate moiety.

[0527] Azide reactive moieties: In some aspects, the reactive moiety is an azide reactive moiety. As used herein the term “azide reactive moiety” refers to a chemical group which can react with a reactive group having an azide moiety. An exemplary azide reactive moiety is an alkyne. Alternative reactive moieties that react with azide moieties are also well known in the art. In some aspects, a carboxylic acid reactive moiety can be attached to a terminal position of an anchoring moiety [AM], spacer [SP], or biologically active molecule [BAM] of the present disclosure. In some aspects, the azide reactive moiety is an alkyne. Typically, an alkyne reacts with the azide of a reactive group through a 1,3-dipolar cycloaddition reaction, also referred to “click chemistry,” to form a 1,2,3-triazole moiety.

### Therapeutic Uses

[0528] The present disclosure provides methods of treating a disease or condition is a subject in need thereof comprising administering a composition comprising EVs (e.g., exosomes) of the present disclosure, i.e., EVs comprising an optimized linker disclosed herein, to the subject. The present disclosure also provides methods of preventing or ameliorating the symptoms of a disease or condition is a subject in need thereof comprising administering a composition comprising EVs (e.g., exosomes) of the present disclosure to the subject. The present disclosure also provides methods to diagnose a disease or condition in a subject in need thereof comprising administering a composition comprising EVs (e.g., exosomes) of the present disclosure, i.e., EVs comprising an optimized linker disclosed herein, to the subject.

[0529] In one aspect, the disease or disorder is a cancer, an inflammatory disease, a neurodegenerative disorder, a central nervous disease or a metabolic disease.

[0530] Present disclosure also provides methods of preventing and/or treating a disease or disorder in a subject in need thereof, comprising administering an EV (e.g., exosome) of the present disclosure, i.e., an EV comprising an optimized linker disclosed herein, to the subject. In some aspects, a disease or disorder that can be treated with the present methods comprises a cancer, graft-versus-host disease (GvHD), autoimmune disease, infectious diseases, or fibrotic diseases. In some aspects, the treatment is prophylactic. In other aspects, the EVs (e.g., exosomes) of the present disclosure, i.e., EVs comprising an optimized linker disclosed herein, are used to induce an immune response. In other aspects, the EVs (e.g., exosomes) for the present disclosure, i.e., EVs comprising an optimized linker disclosed herein, are used to vaccinate a subject.

[0531] In some aspects, the disease or disorder is a cancer. When administered to a subject with a cancer, in certain aspects, EVs (e.g., exosomes) of the present disclosure, i.e., EVs comprising an optimized linker disclosed herein, can up-regulate an immune response and enhance the tumor targeting of the subject's immune system. In some aspects, the cancer being treated is characterized by infiltration of leukocytes (T-cells, B-cells, macrophages, dendritic cells, monocytes) into the tumor microenvironment, or so-called “hot tumors” or “inflammatory tumors.” In some aspects, the cancer being treated is characterized by low levels or undetectable levels of leukocyte infiltration into the tumor microenvironment, or so-called “cold tumors” or “non-inflammatory tumors.” In some aspects, an EV (e.g., exosome) is administered in an amount and for a time sufficient to convert a “cold tumor” into a “hot tumor,” i.e., said administering results in the infiltration of leukocytes (such as T-cells) into the tumor microenvironment. In certain aspects, cancer comprises bladder cancer, cervical cancer, renal cell cancer, testicular cancer, colorectal cancer, lung cancer, head and neck cancer, and ovarian, lymphoma, liver cancer, glioblastoma, melanoma, myeloma, leukemia, pancreatic cancers, or combinations thereof. In other aspects, the terms “distal tumor” or “distant tumor” refer to a tumor that has spread from the original (or primary) tumor to distant organs or distant tissues, e.g., lymph nodes. In some aspects, the EVs (e.g., exosomes) of the disclosure, i.e., EVs comprising an optimized linker disclosed herein, can treat a tumor after the metastatic spread.

[0532] In some aspects, the disease or disorder is a graft-versus-host disease (GvHD). In some aspects, the disease or disorder that can be treated with the present disclosure is an autoimmune disease. Non-limiting examples of autoimmune diseases include: multiple sclerosis, peripheral neuritis, Sjogren's syndrome, rheumatoid arthritis, alopecia, autoimmune pancreatitis, Behcet's disease, bullous pemphigoid, celiac disease, Devic's disease (neuromyelitis optica), glomerulonephritis, IgA nephropathy, assorted vasculitides, scleroderma, diabetes, arteritis, vitiligo, ulcerative colitis, irritable bowel syndrome, psoriasis, uveitis, systemic lupus erythematosus, and combinations thereof.

[0533] In some aspects, the disease or disorder is an infectious disease. In certain aspects, the disease or disorder is an oncogenic virus. In some aspects, infectious diseases that can be treated with the present disclosure includes, but not limited to, human Gamma herpes virus 4 (Epstein Barr virus), influenza A virus, influenza B virus, cytomegalovirus, Staphylococcus aureus, Mycobacterium tuberculosis, Chlamydia trachomatis, HIV-1, HIV-2, corona viruses (e.g., MERS-COV and SARS COV), filoviruses (e.g., Marburg and Ebola), Streptococcus pyogenes, Streptococcus pneumoniae, Plasmodia species (e.g., vivax and falciparum), Chikunga virus, human Papilloma virus (HPV), hepatitis B, hepatitis C, human herpes virus 8, herpes simplex virus 2 (HSV2), Klebsiella sp., Pseudomonas aeruginosa, Enterococcus sp., Proteus sp., Enterobacter sp., Actinobacter sp., coagulase-negative staphylococci (CoNS), Mycoplasma sp., or combinations thereof.

[0534] In some aspects, a disease or disorder that can be treated with the present methods comprises a Pompe disease, Gaucher, a lysosomal storage disorder, mucovicidosis, cystic fibrosis, Duchenne and Becker muscular dystrophy, transthyretin amyloidosis, hemophilia A, hemophilia B, adenosine-deaminase deficiency, Leber's congenital amaurosis, X-linked adrenoleukodystrophy, metachromatic leukodystrophy, OTC deficiency, glycogen storage disease 1A, Criggler-Najjar syndrome, primary hyperoxaluria type 1, acute intermittent porphyria, phenylketonuria, familial hypercholesterolemia, mucopolysaccharidosis type VI, «1 antitrypsin deficiency, Retts Syndrome, Dravet Syndrome, Angelman Syndrome, DMI disease, Fragile X disease, Huntingtons Disease, Friedreichs ataxia, CMT disease (also known as Charcot-Marie-Tooth disease, hereditary motor and sensory neuropathy (HMSN), or peroneal muscular atrophy), CMTIX disease, catecholaminergic polymorphic ventricular tachycardia, spinocerebellar ataxia type 3 (SCA3) disease, limb-girdle muscular dystrophy, or a hypercholesterolemia. In some aspects, the treatment is prophylactic.

[0535] In some aspects, the disease or disorder is a neurodegenerative disease. In some aspects, the neurodegenerative disease is selected from Alzheimer's disease, Parkinson's disease, prion disease, motor neuron disease, Huntington's disease, spinocerebellar ataxia, spinal muscular atrophy, and any combination thereof.

[0536] In certain aspects, the disease or disorder comprises a muscular dystrophy. In some aspects, the muscular dystrophy is selected from Duchenne type muscular dystrophy (DMD), myotonic muscular dystrophy, facioscapulohumeral muscular dystrophy (FSHD), congenital muscular dystrophy, limb-girdle muscular dystrophy (including, but not limited to, LGMD2B, LGMD2D, LGNMD2L, LGMD2C, LGMD2E and LGMD2A), and any combination thereof.

[0537] In some aspects, the disease or disorder is selected from AADC deficiency (CNS), ADA-SCID, Alpha-1 antitrypsin deficiency, β-thalassemia (severe sickle cell), Cancer (head and neck squamous cell), Niemman-Pick Type C Disease, Cerebral ALD, Choroideremia, Congestive heart failure, Cystic Fibrosis, Duchenne muscular dystrophy (DMD), Fabry disease, Glaucoma, Glioma (cancer), Hemophilia A, Hemophilia B, HoFH (hypercholesterolemia), Huntington's Disease, Lipoprotein lipase deficiency, Leber hereditary optic neuropathy (LHON), Metachromatic leukodystrophy, MPS I (Hurler syndrome), MPS II (Hunter's syndrome), MPS III (Sanfilippo Syndrome), Parkinson's disease, Pompe Disease, Recessive Dystrophic Epidermolysis Bullosa, RPE65 deficiency (vision loss), Spinal Muscular Atrophy (SMA I), Wet AMD (retinal disease), Wiskott Aldrich syndrome (WAS), Mucopolysaccharidosis type IIIA (MPS IIIA), X-linked myotubular myopathy, X-linked retinitis pigmentosa, and any combination thereof.

[0538] In some aspects, the EVs (e.g., exosomes) are administered intravenously to the circulatory system of the subject. In some aspects, the EVs (e.g., exosomes) are infused in suitable liquid and administered into a vein of the subject. In some aspects, the EVs (e.g., exosomes) are administered intra-arterialy to the circulatory system of the subject. In some aspects, the EVs (e.g., exosomes) are infused in suitable liquid and administered into an artery of the subject. In some aspects, the EVs (e.g., exosomes) are administered to the subject by intrathecal administration. In some aspects, the EVs (e.g., exosomes) are administered via an injection into the spinal canal, or into the subarachnoid space so that it reaches the cerebrospinal fluid (CSF). In some aspects, the EVs (e.g., exosomes) are administered intratumorally into one or more tumors of the subject. In some aspects, the EVs (e.g., exosomes) are administered to the subject by intranasal administration. In some aspects, the EVs (e.g., exosomes) can be insufflated through the nose in a form of either topical administration or systemic administration. In certain aspects, the EVs (e.g., exosomes) are administered as nasal spray. In some aspects, the EVs (e.g., exosomes) are administered to the subject by intraperitoneal administration. In some aspects, the EVs (e.g., exosomes) are infused in suitable liquid and injected into the peritoneum of the subject. In some aspects, the intraperitoneal administration results in distribution of the EVs (e.g., exosomes) to the lymphatics. In some aspects, the intraperitoneal administration results in distribution of the EVs (e.g., exosomes) to the thymus, spleen, and/or bone marrow. In some aspects, the intraperitoneal administration results in distribution of the EVs (e.g., exosomes) to one or more lymph nodes. In some aspects, the intraperitoneal administration results in distribution of the EVs (e.g., exosomes) to one or more of the cervical lymph node, the inguinal lymph node, the mediastinal lymph node, or the sternal lymph node. In some aspects, the intraperitoneal administration results in distribution of the EVs (e.g., exosomes) to the pancreas. In some aspects, the EVs (e.g., exosomes) are administered to the subject by periocular administration. In some aspects, the EVs (e.g., exosomes) are injected into the periocular tissues. Periocular drug administration includes the routes of subconjunctival, anterior sub-Tenon's, posterior sub-Tenon's, and retrobulbar administration.

### Pharmaceutical Compositions and Methods of Administration

[0539] The present disclosure also provides pharmaceutical compositions comprising EVs (e.g., exosomes) of the present disclosure, i.e., EVs comprising an optimized linker disclosed herein, that are suitable for administration to a subject. The pharmaceutical compositions generally comprise a plurality of EVs (e.g., exosomes) comprising a biologically active molecule covalently linked to the plurality of EVs (e.g., exosomes) via an optimized linker disclosed herein and a pharmaceutically-acceptable excipient or carrier in a form suitable for administration to a subject. Pharmaceutically acceptable excipients or carriers are determined in part by the particular composition being administered, as well as by the particular method used to administer the composition. Accordingly, there is a wide variety of suitable formulations of pharmaceutical compositions comprising a plurality of EVs (e.g., exosomes). (See, e.g., Remington's Pharmaceutical Sciences, Mack Publishing Co., Easton, Pa. 18th ed. (1990)). The pharmaceutical compositions are generally formulated sterile and in full compliance with all Good Manufacturing Practice (GMP) regulations of the U.S. Food and Drug Administration. In some aspects, the pharmaceutical composition comprises one or more chemical compounds, such as for example, small molecules covalently linked to an EV (e.g., exosome) of the present disclosure, i.e., an EV comprising an optimized linker disclosed herein.

[0540] In some aspects, a pharmaceutical composition comprises one or more therapeutic agents and an EV (e.g., exosome) of the present disclosure, i.e., an EV comprising an optimized linker disclosed herein. In certain aspects, the EVs (e.g., exosomes) are co-administered with of one or more additional therapeutic agents, in a pharmaceutically acceptable carrier. In some aspects, the pharmaceutical composition comprising the EV (e.g., exosome) is administered prior to administration of the additional therapeutic agents. In other aspects, the pharmaceutical composition comprising the EV (e.g., exosome) is administered after the administration of the additional therapeutic agents. In further aspects, the pharmaceutical composition comprising the EV (e.g., exosome) is administered concurrently with the additional therapeutic agents.

[0541] The present disclosure provides pharmaceutical compositions comprising an EV (e.g., exosome) of the present disclosure, i.e., an EV comprising an optimized linker disclosed herein, having the desired degree of purity, and a pharmaceutically acceptable carrier or excipient, in a form suitable for administration to a subject. Pharmaceutically acceptable excipients or carriers can be determined in part by the particular composition being administered, as well as by the particular method used to administer the composition. Accordingly, there is a wide variety of suitable formulations of pharmaceutical compositions comprising a plurality of extracellular vesicles. (See, e.g., Remington's Pharmaceutical Sciences, Mack Publishing Co., Easton, Pa. 21st ed. (2005)). The pharmaceutical compositions are generally formulated sterile and in full compliance with all Good Manufacturing Practice (GMP) regulations of the U.S. Food and Drug Administration.

[0542] In some aspects, a pharmaceutical composition comprises one or more therapeutic agents and an EV (e.g., exosome) of the present disclosure, i.e., an EV comprising an optimized linker disclosed herein. In certain aspects, the EVs (e.g., exosomes) are co-administered with of one or more additional therapeutic agents, in a pharmaceutically acceptable carrier. In some aspects, the pharmaceutical composition comprising the EV (e.g., exosome) is administered prior to administration of the additional therapeutic agents. In other aspects, the pharmaceutical composition comprising the EV (e.g., exosome) is administered after the administration of the additional therapeutic agents. In further aspects, the pharmaceutical composition comprising the EV (e.g., exosome) is administered concurrently with the additional therapeutic agents.

[0543] Acceptable carriers, excipients, or stabilizers are nontoxic to recipients (e.g., animals or humans) at the dosages and concentrations employed, and include buffers such as phosphate, citrate, and other organic acids; antioxidants including ascorbic acid and methionine; preservatives (such as octadecyldimethylbenzyl ammonium chloride; hexamethonium chloride; benzalkonium chloride, benzethonium chloride; phenol, butyl or benzyl alcohol; alkyl parabens such as methyl or propyl paraben; catechol; resorcinol; cyclohexanol; 3-pentanol; and m-cresol); low molecular weight (less than about 10 residues) polypeptides; proteins, such as serum albumin, gelatin, or immunoglobulins; hydrophilic polymers such as polyvinylpyrrolidone; amino acids such as glycine, glutamine, asparagine, histidine, arginine, or lysine; monosaccharides, disaccharides, and other carbohydrates including glucose, mannose, or dextrins; chelating agents such as EDTA; sugars such as sucrose, mannitol, trehalose or sorbitol; salt-forming counter-ions such as sodium; metal complexes (e.g., Zn-protein complexes); and/or non-ionic surfactants such as TWEEN™, PLURONICS™ or polyethylene glycol (PEG).

[0544] Examples of carriers or diluents include, but are not limited to, water, saline, Ringer's solutions, dextrose solution, and 5% human serum albumin. The use of such media and compounds for pharmaceutically active substances is well known in the art. Except insofar as any conventional media or compound is incompatible with the extracellular vesicles described herein, use thereof in the compositions is contemplated. Supplementary therapeutic agents can also be incorporated into the compositions. Typically, a pharmaceutical composition is formulated to be compatible with its intended route of administration. The EVs (e.g., exosomes) of the present disclosure, i.e., EVs comprising an optimized linker disclosed herein, can be administered by parenteral, topical, intravenous, oral, subcutaneous, intra-arterial, intradermal, transdermal, rectal, intracranial, intraperitoneal, intranasal, intratumoral, intrathecal, intraocular, intramuscular route or as inhalants. In certain aspects, the pharmaceutical composition comprising EVs (e.g., exosomes) is administered intravenously, e.g. by injection. The EVs (e.g., exosomes) can optionally be administered in combination with other therapeutic agents that are at least partly effective in treating the disease, disorder or condition for which the EVs (e.g., exosomes) are intended.

[0545] Solutions or suspensions can include the following components: a sterile diluent such as water, saline solution, fixed oils, polyethylene glycols, glycerine, propylene glycol or other synthetic solvents; antibacterial compounds such as benzyl alcohol or methyl parabens; antioxidants such as ascorbic acid or sodium bisulfite; chelating compounds such as ethylenediaminetetraacetic acid (EDTA); buffers such as acetates, citrates or phosphates, and compounds for the adjustment of tonicity such as sodium chloride or dextrose. The pH can be adjusted with acids or bases, such as hydrochloric acid or sodium hydroxide. The preparation can be enclosed in ampoules, disposable syringes or multiple dose vials made of glass or plastic.

[0546] Pharmaceutical compositions suitable for injectable use include sterile aqueous solutions (if water soluble) or dispersions and sterile powders. For intravenous administration, suitable carriers include physiological saline, bacteriostatic water, Cremophor EL™ (BASF, Parsippany, N.J.) or phosphate buffered saline (PBS). The composition is generally sterile and fluid to the extent that easy syringeability exists. The carrier can be a solvent or dispersion medium containing, e.g., water, ethanol, polyol (e.g., glycerol, propylene glycol, and liquid polyethylene glycol, and the like), and suitable mixtures thereof. The proper fluidity can be maintained, e.g., by the use of a coating such as lecithin, by the maintenance of the required particle size in the case of dispersion and by the use of surfactants. Prevention of the action of microorganisms can be achieved by various antibacterial and antifungal compounds, e.g., parabens, chlorobutanol, phenol, ascorbic acid, thimerosal, and the like. If desired, isotonic compounds, e.g., sugars, polyalcohols such as mannitol, sorbitol, and sodium chloride can be added to the composition. Prolonged absorption of the injectable compositions can be brought about by including in the composition a compound which delays absorption, e.g., aluminum monostearate and gelatin.

[0547] Sterile injectable solutions can be prepared by incorporating the EVs (e.g., exosomes) of the present disclosure, i.e., EVs comprising an optimized linker disclosed herein, in an effective amount and in an appropriate solvent with one or a combination of ingredients enumerated herein, as desired. Generally, dispersions are prepared by incorporating the EVs (e.g., exosomes) into a sterile vehicle that contains a basic dispersion medium and any desired other ingredients. In the case of sterile powders for the preparation of sterile injectable solutions, methods of preparation are vacuum drying and freeze-drying that yields a powder of the active ingredient plus any additional desired ingredient from a previously sterile-filtered solution thereof. The EVs (e.g., exosomes) can be administered in the form of a depot injection or implant preparation which can be formulated in such a manner to permit a sustained or pulsatile release of the EVs (e.g., exosomes).

[0548] Systemic administration of compositions comprising EVs (e.g., exosomes) of the present disclosure, i.e., EVs comprising an optimized linker disclosed herein, can also be by transmucosal means. For transmucosal administration, penetrants appropriate to the barrier to be permeated are used in the formulation. Such penetrants are generally known in the art, and include, e.g., for transmucosal administration, detergents, bile salts, and fusidic acid derivatives. Transmucosal administration can be accomplished through the use of, e.g., nasal sprays.

[0549] In certain aspects the pharmaceutical composition comprising EVs (e.g., exosomes) of the present disclosure, i.e., EVs comprising an optimized linker disclosed herein, is administered intravenously into a subject that would benefit from the pharmaceutical composition. In certain other aspects, the composition is administered to the lymphatic system, e.g., by intralymphatic injection or by intranodal injection (see e.g., Senti et al., PNAS 105(46): 17908 (2008)), or by intramuscular injection, by subcutaneous administration, by intratumoral injection, by direct injection into the thymus, or into the liver.

[0550] In certain aspects, the pharmaceutical composition comprising EVs (e.g., exosomes) of the present disclosure, i.e., EVs comprising an optimized linker disclosed herein, is administered as a liquid suspension. In certain aspects, the pharmaceutical composition is administered as a formulation that is capable of forming a depot following administration. In certain preferred aspects, the depot slowly releases the EVs (e.g., exosomes) into circulation, or remains in depot form.

[0551] Typically, pharmaceutically-acceptable compositions are highly purified to be free of contaminants, are biocompatible and not toxic, and are suited to administration to a subject. If water is a constituent of the carrier, the water is highly purified and processed to be free of contaminants, e.g., endotoxins.

[0552] The pharmaceutically-acceptable carrier can be lactose, dextrose, sucrose, sorbitol, mannitol, starch, gum acacia, calcium phosphate, alginates, gelatin, calcium silicate, micro-crystalline cellulose, polyvinylpyrrolidone, cellulose, water, syrup, methyl cellulose, methylhydroxy benzoate, propylhydroxy benzoate, talc, magnesium stearate, and/or mineral oil, but is not limited thereto. The pharmaceutical composition can further include a lubricant, a wetting agent, a sweetener, a flavor enhancer, an emulsifying agent, a suspension agent, and/or a preservative.

[0553] The pharmaceutical compositions described herein comprise EVs (e.g., exosomes) of the present disclosure, i.e., EVs comprising an optimized linker disclosed herein, and optionally a pharmaceutically active or therapeutic agent. The therapeutic agent can be a biological agent, a small molecule agent, or a nucleic acid agent.

[0554] Dosage forms are provided that comprise a pharmaceutical composition comprising EVs (e.g., exosomes) of the present disclosure, i.e., EVs comprising an optimized linker disclosed herein. In some aspects, the dosage form is formulated as a liquid suspension for intravenous injection. In some aspects, the dosage form is formulated as a liquid suspension for intratumoral injection.

[0555] In certain aspects, the preparation of EVs (e.g., exosomes) of the present disclosure, i.e., EVs comprising an optimized linker disclosed herein, is subjected to radiation, e.g., X rays, gamma rays, beta particles, alpha particles, neutrons, protons, elemental nuclei, UV rays in order to damage residual replication-competent nucleic acids.

[0556] In certain aspects, the preparation of EVs (e.g., exosomes) of the present disclosure, i.e., EVs comprising an optimized linker disclosed herein, is subjected to gamma irradiation using an irradiation dose of more than 1, 5, 10, 15, 20, 25, 30, 35, 40, 50, 60, 70, 80, 90, 100, or more than 100 kGy.

[0557] In certain aspects, the preparation of EVs (e.g., exosomes) of the present disclosure, i.e., EVs comprising an optimized linker disclosed herein, is subjected to X-ray irradiation using an irradiation dose of more than 0.1, 0.5, 1, 5, 10, 15, 20, 25, 30, 35, 40, 50, 60, 70, 80, 90, 100, 200, 300, 400, 500, 600, 700, 800, 900, 1000, 2000, 3000, 4000, 5000, 6000, 7000, 8000, 9000, 10000, or

[0558] The EVs (e.g., exosomes) of the present disclosure may be used concurrently with other drugs. To be specific, the EVs (e.g., exosomes) of the present disclosure may be used together with medicaments such as hormonal therapeutic agents, chemotherapeutic agents, immunotherapeutic agents, medicaments inhibiting the action of cell growth factors or cell growth factor receptors and the like.

### Kits

[0559] The present disclosure also provides kits, or products of manufacture comprising one or more EVs (e.g., exosomes) of the present disclosure, i.e., EVs comprising an optimized linker disclosed herein, and optionally instructions for use. In some aspects, the kit, or product of manufacture contains a pharmaceutical composition described herein which comprises at least one EV (e.g., exosome) of the present disclosure, i.e., an EV comprising an optimized linker disclosed herein, and instructions for use. In some aspects, the kit, or product of manufacture comprises at least one EV (e.g., exosome) of the present disclosure, i.e., an EV comprising an optimized linker disclosed herein, or a pharmaceutical composition comprising the EVs (e.g., exosomes) in one or more containers. One skilled in the art will readily recognize that the EVs (e.g., exosomes) of the present disclosure, pharmaceutical composition comprising the EVs (e.g., exosomes) of the present disclosure, i.e., EVs comprising an optimized linker disclosed herein, or combinations thereof can be readily incorporated into one of the established kit formats which are well known in the art.

[0560] In some aspects, the kit, or product of manufacture comprises EVs (e.g., exosomes) one or more biologically active molecules, reagents to covalently attach the one or more biologically active molecules to the EVs (e.g., exosomes) via an optimized linker disclosed herein, e.g., via conjugation or solid phase synthesis, and instructions to conduct the reaction to covalently attach the one or more biologically active molecules to the EVs (e.g., exosomes) via an optimized linker disclosed herein.

[0561] In some aspects, the kit comprises reagents to conjugate a biologically active molecule to an EV (e.g., exosome) via an optimized linker disclosed herein, e.g., via conjugation (e.g., maleimide chemistry) or solid phase synthesis, and instructions to conduct the conjugation.

[0562] The practice of the present disclosure will employ, unless otherwise indicated, conventional techniques of cell biology, cell culture, molecular biology, transgenic biology, microbiology, recombinant DNA, and immunology, which are within the skill of the art. Such techniques are explained fully in the literature. See, for example, Sambrook et al., ed. (1989) Molecular Cloning A Laboratory Manual (2nd ed.; Cold Spring Harbor Laboratory Press); Sambrook et al., ed. (1992) Molecular Cloning: A Laboratory Manual, (Cold Springs Harbor Laboratory, NY); D. N. Glover ed., (1985) DNA Cloning, Volumes I and II; Gait, ed. (1984) Oligonucleotide Synthesis; Mullis et al. U.S. Pat. No. 4,683,195; Hames and Higgins, eds. (1984) Nucleic Acid Hybridization; Hames and Higgins, eds. (1984) Transcription And Translation; Freshney (1987) Culture Of Animal Cells (Alan R. Liss, Inc.); Immobilized Cells And Enzymes (IRL Press) (1986); Perbal (1984) A Practical Guide To Molecular Cloning; the treatise, Methods In Enzymology (Academic Press, Inc., N.Y.); Miller and Calos eds. (1987) Gene Transfer Vectors For Mammalian Cells, (Cold Spring Harbor Laboratory); Wu et al., eds., Methods In Enzymology, Vols. 154 and 155; Mayer and Walker, eds. (1987) Immunochemical Methods In Cell And Molecular Biology (Academic Press, London); Weir and Blackwell, eds., (1986) Handbook Of Experimental Immunology, Volumes I-IV; Manipulating the Mouse Embryo, Cold Spring Harbor Laboratory Press, Cold Spring Harbor, N.Y., (1986); Crooke, Antisense drug Technology: Principles, Strategies and Applications, 2nd Ed. CRC Press (2007) and in Ausubel et al. (1989) Current Protocols in Molecular Biology (John Wiley and Sons, Baltimore, Md.).

[0563] All publications, patent applications, patents, and other references mentioned herein are incorporated by reference in their entirety. Database entries and electronic publications disclosed in the present disclosure are incorporated by reference in their entireties. The version of the database entry or electronic publication incorporated by reference in the present application is the most recent version of the database entry or electronic publication that was publicly available at the time the present application was filed. The database entries corresponding to gene or protein identifiers (e.g., genes or proteins identified by an accession number or database identifier of a public database such as Genbank, Refseq, or Uniprot) disclosed in the present application are incorporated by reference in their entireties. The gene or protein-related incorporated information is not limited to the sequence data contained in the database entry. The information incorporated by reference includes the entire contents of the database entry in the most recent version of the database that was publicly available at the time the present application was filed. In case of conflict, the present specification, including definitions, will control. In addition, the materials, methods, and examples are illustrative only and not intended to be limiting.

### EXAMPLES

[0564] The following examples are provided for illustrative purposes only, and are not to be construed as limiting the scope or content of the invention in any way. The practice of the current invention will employ, unless otherwise indicated, conventional methods of protein chemistry, biochemistry, recombinant DNA techniques and pharmacology, within the skill of the art. Such techniques are explained fully in the literature. See, e.g., T. E. Creighton, Proteins: Structures and Molecular Properties (W.H. Freeman and Company, 1993); Green & Sambrook et al., Molecular Cloning: A Laboratory Manual, 4th Edition (Cold Spring Harbor Laboratory Press, 2012); Colowick & Kaplan, Methods in Enzymology (Academic Press); Remington: The Science and Practice of Pharmacy, 22nd Edition (Pharmaceutical Press, 2012); Sundberg & Carey, Advanced Organic Chemistry: Parts A and B, 5th Edition (Springer, 2007).

### Example 1

### Exosome Generation

[0565] To generate exosomes described herein, human embryonic kidney (HEK) cell line (HEK293SF) were used. Native cells were used to generate “native exosomes” and cells stably transfected with the protein, prostaglandin F2 receptor negative regulator (PTGFRN) were used to generate “Protein X exosomes”. Non-transfected or transfected HEK293SF cells were grown to high density in chemically defined medium for 7 days.

[0566] Conditioned cell culture media was then collected and centrifuged at 300-800×g for 5 minutes at room temperature to remove cells and large debris. Media supernatant was supplemented with 100 U/mL BENZONASE® and incubated at 37° C. for 1 hour in a water bath. Supernatant was collected and centrifuged at 16,000×g for 30 minutes at 4° C. to remove residual cell debris and other large contaminants. Supernatant was then ultracentrifuged at 133,900×g for 3 hours at 4° C. to pellet the exosomes. Supernatant was discarded and any residual media was aspirated from the bottom of the tube. The pellet was resuspended in 200-1000 μL PBS (—Ca—Mg).

[0567] To further enrich exosome populations, the pellet was processed via density gradient purification (sucrose or OPTIPREP™). The gradient was spun at 200,000×g for 16 hours at 4° C. in a 12 mL Ultra-Clear (344059) tube placed in a SW 41 Ti rotor to separate the exosome fraction.

[0568] The exosome layer was gently removed from the top layer and diluted in ˜32.5 mL PBS in a 38.5 mL Ultra-Clear (344058) tube and ultracentrifuged again at 133,900×g for 3 hours at 4° C. to pellet the purified exosomes. The resulting pellet was resuspended in a minimal volume of PBS (˜200 μL) and stored at 4° C.

[0569] For OPTIPREP™ gradient, a 3-tier sterile gradient was prepared with equal volumes of 10%, 30%, and 45% OPTIPREP™ in a 12 mL Ultra-Clear (344059) tube for a SW 41 Ti rotor. The pellet was added to the OPTIPREP™ gradient and ultracentrifuged at 200,000×g for 16 hours at 4° C. to separate the exosome fraction. The exosome layer was then be gently collected from the top˜3 mL of the tube.

[0570] The exosome fraction was diluted in ˜32 mL PBS in a 38.5 mL Ultra-Clear (344058) tube and ultracentrifuged at 133,900×g for 3 hours at 4° C. to pellet the purified exosomes. The pelleted exosomes were then resuspended in a minimal volume of PBS (˜200 μL) and stored at 4° C. until ready to be used.

### Example 2

### ASO Loading on Exosomes

[0571] 10 uL of Exosomes at 1×10¹³ P/mL were mixed with 10 uL of ASO (100 uM). 980 uL of PBS were added and then ultracentrifuged at 100 k g, 20 min). The top 500 uL of supernatant (“supernatant”) were removed. The pellet was decanted and resuspended in 500 uL PBS (“pellet”). “Loading Efficiency” was calculated as the ratio between ASO in the pellet and the total amound of ASO, i.e., ASO in supernatant plus ASO in pellet.

[0572] An ASO loading process in exemplified in FIG. 27.

### Example 3

### Effect of ASO Linker Structure on Potency and Amount Loaded in Engineered or Native Exosomes

[0573] The effect of ASO linker structure on amount of ASO loaded in engineered or native exosomes, as well as the effect of ASO linker structure on ASO potency were evaluated.

[0574] Loading effectiveness of a fixed ASO sequence conjugated to different linkers was evaluated in engineered exosomes. Exosomes over-expressing PTGFRN (Protein X exosomes) were produced in HEK293 cells and purified. ASO payloads were loaded on to the surface of exosomes by mixing. Accordingly, exosomes at a concentration of 1×10¹³ P/mL were mixed 1:1 with 100 UM ASO with sequence for firefly luciferase (FFLuc) that had been conjugated to different linker structures. The loading efficiency was calculated as the percentage of starting ASOs that became coupled to the exosomes.

[0575] FIG. 6 shows the structures of the constructs used. Constructs C1 to C9 used a cholesterol-C6 lipid anchor. Constructs T1 to T9 used a cholesterol-TEG lipid anchor. Construct L1 used a tocopherol-C8 lipid anchors whereas constructs L2 and L3 used a tocopherol palmitate-C6 lipid anchor. Other linker components indicated in FIG. 6 are: phosphodiester (PO), phosphorothioate (PS), hexamethylene (C6), trimethylene (C3), triethylene glycol (TEG), and hexaethylene glycol (HEG).

[0576] The results indicated that the mount of ASO molecules loaded per engineered exosome was affected by linker structure (FIG. 6). In general, loading efficiency was higher for constructs with the cholesterol-C6 anchor than for constructs with the cholesterol-TEG anchort. The highest loading efficacy, 68.78%, was observed for constructs with a tocopherol-C8 lipid anchor, corresponding to a load of 4,127 ASO units per exosome.

[0577] The loading efficiency of the same fixed ASO sequence conjugated to different linkers evaluated in FIG. 5 using engineered exosomes was also evaluated using native exosomes. See FIG. 5. Native exosomes were produced in HEK293 cells and purified. Exosomes at a concentration of 1×10¹³ P/mL were mixed 1:1 with 100 UM ASO with a sequence for firefly luciferase that had been conjugated to different linker structures. The loading efficiency was calculated as the percentage of starting ASOs that became coupled to the exosomes. As in the case of engineered exosomes, the amount of ASO molecules loaded per native exosome was affected by linker structure (FIG. 5). Again, constructs with a cholesterol-C6 lipid anchor showed higher loading efficacy than constructs with a cholesterol-TEG lipid anchor. Loading efficacies over 90% were observed for constructs C2 and C3 (93.6% and 90.67%), corresponding to 5,616 and 5,440 ASO units per exosome, respectively. Thus, the maximum load efficacies and number of ASO per exosome were significantly higher in native exosomes than in engineered exosomes overexpressing PTGFRN (FIG. 6).

[0578] Predictive models for load density were developed based on ASO linker structure (FIG. 7 and FIG. 8). The models show that load density depends, in decreasing order of importance, exosome>membrane anchor (AM)>proximal EV spacer (SP1)˜distal EV spacer (SP2). The SP1 contribution was more important than the SP2 contribution in protein X exosome. On the other hand, the SP2 contribution was higher than the SP1 contribution in native exosomes.

[0579] The fold increases in load density as a function of linker modification were consistent across exosomes, i.e., in native and protein X exosomes. The best performing membrane anchors were tocopherol and cholesterol. The best S1 spacers were C3 and TEG, which were significantly better than HEG.

[0580] Use of the tocopherol-C8 membrane anchor resulted in exceptional exosome loading, but not a comparable increase in potency.

[0581] Stable H1299 cells were generated that constitutively express firefly luciferase protein. Native exosomes were loaded with ASO complementary to the mRNA for firefly luciferase protein, which when added to the cells, results in knock-down of the signal for luciferase protein. The linker structures described in FIG. 9A were comparatively evaluated to determine the effect on potency (FIG. 9B: T1-T9; FIG. 9C: C1-C9, L1-L3) with arrows highlighting the structures that provided the most luciferase knockdown (FIG. 9A, 9B). The relative amounts of ASO-loaded exosomes that were added to the cells were varied as indicated by the relative “multiplicity of infection” ratios provided in the legend. The knockdown for each linker structure (C1-C9, T1-T9, L1-L3) was normalized by the amount of ASO in the T7 sample (control). Structures T2, T4, and C2-C5 providing the best increase in potency, with a ≥2-fold increase in potency achieved through optimization of the linker.

[0582] Stable H1299 cells were generated that constitutively express firefly luciferase protein. Native exosomes (FIG. 10A) or exosomes over-expressing PTGFRN (FIG. 10B) were loaded with ASO complementary to the mRNA for firefly luciferase protein, which when added to the cells, results in knock-down of the signal for luciferase protein. The minimum normalized expression of luciferase (indicating maximum knockdown) was determined for each ASO linker and compared to the loading density achieved with the linker. Optimal linkers are defined by maximum ASO/EV loading and/or minimum normalized expression of firefly luciferase. For this ASO sequence, cholesterol and tocopherol-c8 were shown to be the best anchoring moiety for association with native exosomes and exosomes with over-expressed PTGFRN, respectively. TEG and C3 provided the largest increase in potency of the options for spacer 1.

### Example 4

### Correlation of Loading-Density, Stability, and Potency with ASO-Linker-Lipid Structures

[0583] Using the same ASO sequence, different linker chemistries were evaluated for the purpose of attaching an oligonucleotide (i.e. an anti-sense oligonucleotide (ASO)) to either native exosomes or exosomes with overexpressed PTGFRN. Five different membrane anchors were employed: cholesterol, palmitate, tocopherol, 18:1 PDP PE and 16:0 Cyanur PE. To these membrane anchors, ASOs were conjugated via linear linkers comprised of one or more of the following components were conjugated: trimethylene (C3), hexamethylene (C6), octylethylene (C8), triethyleneglycol (TEG), and hexaethylene glycol (HEG). The bonds between the linkers were phosphodiester bonds. The components used for the design of the ASO-linker-lipid constructs are shown in FIG. 11.

[0584] FIG. 12 shows the sequences of the modified ASOs used in the experiments disclosed in the current example. The ASOs are named after the targeted genes. Two ASOs, named FFLUC and RLUC, target ther FFLUC and RLUC luminescent gene reporters. Two ASOs, named STAT6 and MYC, target the STAT6 and MYC therapeutic genes. The base sequences of the FFLUC, RLUC, STAT6, and MYC ASOs are respectively 5′-TCGAAGTACTCGGCGTAGGT-3′ (SEQ ID NO: 1089), 5′-AACCCAGGGTCGGACTCGAT-3′ (SEQ ID NO: 1090), 5′-GCAAGATCCCGGATTCGGTC-3′ (SEQ ID NO: 1091), and 5′-GACGTGGCACCTCTTGAGGA-3′ (SEQ ID NO: 1092), which were modified as shown in FIG. 12.

[0585] Correlation of loading-density with ASO-linker-lipid structures: An optimal linker design will yield high loading density (amount of ASO loaded per EV) to maximize the potency per exosome and high potency per ASO molecule. ASO payload were combinatorially designed with four different oligonucleotide sequences and up to 14 different linker structures. These payloads were then loaded on exosomes with overexpressed PTGFRN and the loading density was determined. A statistical model (R2=0.86) was generated to determine the contribution of different structural parameters to loading density on the exosomes. The statistical model is shown in FIG. 13A.

[0586] The linker screen revealed that the ASO sequence, membrane anchor, and spacer 1 (the linker proximal to the exosome surface) had a significant effect on loading density. Each lipid has a different partition coefficient that defines the equilibrium amount of lipid that can stably reside in the hydrophobic membrane. The hybrid linear and cyclic hydrophobic structure may provide improved ASO loading because the alkyl chain allows the aromatic ring to access a greater interior volume of the phospholipid bilayer. Lipid composition can affect the membrane fluidity, potentially mediated, e.g., by induced dipole interactions, dipole interactions, and/or charge interactions. Finally, self-association of the lipids in the aqueous loading buffer may lead to differences in performance across the structures. Similarly, different ASO sequences adopt slightly different conformations and self-associate and/or associate with the exosome surfaces in a sequence-dependent manner.

[0587] The linker screen revealed loading density was significantly affected by the presence of spacer 1, the linker proximal to the exosome. Conversely, spacer 2, the linker that was farthest from the exosome surface did not have a significant effect, suggesting that further increasing the spacer length beyond that provided by spacer 1 does not offer a meaningful advantage for loading. These findings suggest that alterations to the configuration, conformation, or orientation in the area immediately adjacent to the membrane were critical in linker design. Hydrophobic linkers such as C3, C6 and C8 are more hydrophobic than the hydrophilic linkers such as TEG and HEG and thus, more energetically favorable to associate with and penetrate the hydrophobic interior of the membrane. By acting as a hydrophobic tether and increasing the nonpolar volume of the membrane that the membrane anchor could access, the linkers can increase the loading density of the payload. A hydrophilic spacer 1 may improve the thermodynamic binding equilibria in the region surrounding the highly charged and hydrophilic phosphate head groups and exosome exterior surface. Increasing the linker length will increase the spacing of ASOs and reduce the electrostatic repulsion of the anionic ASOs. Beyond a certain distance from the exosome surface, the benefit becomes insignificant.

[0588] In summary, all parts of the payload structures have an impact on their loading density to a different degree, but a trend is maintained across ASO structures (see FIGS. 13B and 13C). The main factor is the ASO used, followed by the proximal EV spacer (Spacer 1), the membrane anchor (Lipid), and the distal EV spacer (Spacer 2).

[0589] Stability of exoASOs: The loading of ASO-linker-lipid relies on the hydrophobic interaction between the lipid moiety and the phospholipid bilayer of exosomes. To examine the resilience of this lipid association, we evaluated five combinations of linker/lipid structures with a range of buffer conditions to determine effect on stability of the associations. The experimental conditions used are summarized in the table below.

| | | | | Characterization |
|---|---|---|---|---|
| Structures | Buffer conditions | Time | Temperature | method |
| Cholesterol-TEG- | 20 mM Phosphate, | 0 day; | 25° C.; 4° C. | Ribogreen: ASO |
| None-STAT6; | 50 mM NaCl, pH 7 | 2 days; | | concentration; |
| Cholesterol-C6- | (low salt); | 4 days; | | Nanoparticle |
| C3-STAT6; | 20 mM Phosphate, | 8 days | | tracking analysis: |
| Tocopherol-C8- | 150 mM NaCl, pH 7 | | | particle count; |
| TEG-STAT6; | (high salt); | | | Dynamic light |
| Tocopherol-TEG- | 20 mM Phosphate, | | | scattering: |
| HEG-STAT6; | 150 mM NaCl, | | | particle size |
| Palmitate-C6- | sucrose, pH 7 | | | |
| HEG-STAT6. | (sucrose). | | | |

HEG: hexaethylene glycol spacer,
TEG: tetratethylene glycol spacer,
C3: trimethylene;
C6: hexamethylene,
none: indicates no additional spacer was included at that location;
STAT6: ASO sequence that knocks down expression of signal transducer and activator of transcription 6

[0590] The ASO-linker-lipid was loaded on exosomes and maintained in the three buffer conditions at two different temperatures for 8 days as described in previous table. The amount of exosome-associated ASO, referred to as “ASO (uM)” in FIGS. 13A-13E was assessed by subtracting the dissociated free ASO from the total ASO content.

[0591] The effect of the use of phosphodioester or phosphorothioate linkages in the exoASO-STAT6 Control (Chol-TEG-HEG) shown in FIG. 13B is presented in FIGS. 19A-19C. The highest potency, quantitated as ASO concentration (nM) or exosome particles (p/mL), was observed when both linkers were phosphorothioatre (PS). The lowest potency was observed when the linkage closest to the lipid anchoring moiety was phosphodiester and the distal linkage was phosphorothioate.

[0592] In general, buffers with increased NaCl resulted in a higher loading density. The loading density between high salt and low salt buffer condition varied with linker-lipid structures. The concentration of exosome associated ASO in three different buffer conditions remained stable over 8 days at both 25° C. and 4° C. See FIG. 15. In addition, the particle count (FIG. 16) and particle size (FIG. 17) did not change. See also FIGS. 20-22. The data indicated that ASOs with diverse lipid/linker structures were stable under the tested buffer conditions, time range and temperature, properties necessary for successful implementation in GMP manufacturing and use in clinical trials.

[0593] Potency of ExoASOs: FIG. 18 shows that for the exoASO-STAT6 control, the potency per exosome positively correlated with loading density. However, among the different linker structures tested, there was no obvious correlation between potency and loading density. In other words, across linker structures, higher loading density did not necessarily result in higher potency. Among the linkers tested, three displayed lower IC₅₀ values (i.e., higher potency). These linkers were Chol-TEG, Chol-C6-C3, and Toco-C8-TEG.

[0594] In addition to the non-cleavable constructs disclosed above, other constructs using cleavable linkers were tested, e.g., Val-Cit cleavable linkers. Examples of lipid-linker-ASO structure designs with a Val-Cit cleavable linker mechanism in which the ASO is a STAT6 ASO are shown in FIG. 23A. The potency of the constructs described in FIG. 23A is shown in FIG. 23B.

[0595] Another example of cleavable linker that was also tested were redox linkers. FIG. 25 shows an exemplary lipid-linker-ASO design with a redox cleavable linker mechanism in which the ASO is a STAT6 ASO, and its potency is shown in FIG. 26.

### Example 5

### EGFP Splicing Rescue Assay

[0596] An EGFP splicing rescue assay was developed to characterize the linker constructs disclosed herein. The 293AAV-pCB-2754 cell line was developed to evaluate the efficacy of EGFP and exoEGFP with various linkers. Point mutation at 654 results in the inability of fully transcribing the EGFP; thus, no luminescence from EGFP or Nano Luciferase is observed. With the treatment with an ASO, EGFP was rescued, and therefore, both EGFP and Nano Luciferase signal was observed. The luminescence of Nano luciferase was employed for high-throughput quantification of efficacy. FIG. 28 shows a schematic representation of the development of the EGFP splicing rescue assay. The modified sequence of the EGFP ASO used in the test is also shown in FIG. 28. The base sequence of the EGFP ASO is GCTATTACCTTAACCCAG (SEQ ID NO: 1093). Examples of lipid-linker-ASO design for testing in the EGFP assay, i.e., constructs in which the ASO was the modified EGFP ASO presented in FIG. 28 are shown in FIG. 24. The linkers tested included both cleavable and non-cleavable linkers. The loading, purification, and characterization processes for a lipid-linker-EGFP constructs used in the EGFP rescue assay are shown in FIG. 27.

[0597] The newly developed cell line used in the EGFP splicing rescue assay was characterized in terms of cell viability (CTG assay) and efficacy at three dose levels. See FIG. 29.

[0598] FIG. 30 shows loading density and efficacy of exoASO-EGFP with various PO and non-cleavable PEG linkers using the EGFP splicing rescue assay. “Low” and “High” is a relative, qualitative reference to the loading density achieved in a paired set of experiments, where loading density was controlled through modulation of loading temperature and ASO concentration.

[0599] It is to be appreciated that the Detailed Description section, and not the Summary and Abstract sections, is intended to be used to interpret the claims. The Summary and Abstract sections may set forth one or more but not all exemplary aspects of the present disclosure as contemplated by the inventor(s), and thus, are not intended to limit the present disclosure and the appended claims in any way.

[0600] The present disclosure has been described above with the aid of functional building blocks illustrating the implementation of specified functions and relationships thereof. The boundaries of these functional building blocks have been arbitrarily defined herein for the convenience of the description. Alternate boundaries can be defined so long as the specified functions and relationships thereof are appropriately performed.

[0601] The foregoing description of the specific aspects will so fully reveal the general nature of the disclosure that others can, by applying knowledge within the skill of the art, readily modify and/or adapt for various applications such specific aspects, without undue experimentation, without departing from the general concept of the present disclosure. Therefore, such adaptations and modifications are intended to be within the meaning and range of equivalents of the disclosed aspects, based on the teaching and guidance presented herein. It is to be understood that the phraseology or terminology herein is for the purpose of description and not of limitation, such that the terminology or phraseology of the present specification is to be interpreted by the skilled artisan in light of the teachings and guidance.

[0602] The breadth and scope of the present disclosure should not be limited by any of the above-described exemplary aspects, but should be defined only in accordance with the following claims and their equivalents.

[0603] The contents of all cited references (including literature references, patents, patent applications, and websites) that may be cited throughout this application are hereby expressly incorporated by reference in their entirety for any purpose, as are the references cited therein.

What is claimed is:

1. An extracellular vesicle (EV) comprising a biologically active molecule (BAM) covalently linked to the EV via an anchoring moiety (AM) according to the formula:
[AM]-L₁-[SP₁]-L₂-[SP₂]-L₃-[BAM] (Formula 1)
wherein:
[AM] is the anchoring moiety;
L₁ is a cleavable or non-cleavable linkage;
L₂ and L₃ are optional cleavable or non-cleavable linkages;
SP₁ is an optional first spacer; and,
SP₂ is an optional second spacer.

2. The extracellular vesicle of claim 1, wherein the anchoring moiety [AM] comprises a sterol, a lipid, a vitamin, a peptide, or a combination thereof and optionally a spacer.

3. The extracellular vesicle of claim 2, wherein the optional spacer is an alkyl spacer.

4. The extracellular vesicle of claim 3, wherein the alkyl spacer is C1, C2, C3, C4, C5, C6, C7, C8, C9, C10, C11, C12, C13, C14, or C15.

5. The extracellular vesicle of claim 3, wherein the alkyl spacer is C6 or C8.

6. The extracellular vesicle of claim 2, wherein the optional spacer is a glycol spacer.

7. The extracellular vesicle of claim 5, wherein the glycol spacer has 2 (diethylene glycol), 3 (triethylene glycol), 4 (tetraethylene glycol; TEG), 5 (pentaethylene glycol), 6 (hexaethylene glycol; HEG), 7, 8, 9, 10, 11, 12, 13, 14, or 15 glycol units.

8. The extracellular vesicle of claim 5, wherein the glycol spacer is tetraethylene glycol (TEG).

9. The extracellular vesicle of claim 2, wherein the sterol is selected from the group consisting of cholesterol, ergosterol, 7-dehydrocholesterol, 24S-hydroxycholesterol, lanosterol, cycloartenol, fucosterol, saringosterol, campesterol, β-sitosterol, sitostanol, coprostanol, avenasterol, and stigmasterol.

10. The extracellular vesicle of claim 2, wherein the sterol is cholesterol.

11. The extracellular vesicle of claim 2, wherein the lipid is a fatty acid.

12. The extracellular vesicle of claim 11, wherein the fatty acid is a straight chain fatty acid.

13. The extracellular vesicle of claim 11, wherein the fatty acid is a straight chain fatty acid, a branched fatty acid, an unsaturated fatty acid, a monounsaturated fatty acid, a polyunsaturated fatty acid, a hydroxyl fatty acid, a polycarboxylic acid, or any combination thereof.

14. The extracellular vesicle of claim 12, wherein the straight chain fatty acid is butyric acid, caproic acid, caprylic acid, capric acid, lauric acid, myristic acid, palmitic acid, or stearic acid.

15. The extracellular vesicle of claim 12, wherein the straight chain fatty acid is palmitic acid.

16. The extracellular vesicle of claim 2, wherein the vitamin is vitamin E (tocopherol or tocotrienol), vitamin D, vitamin K, riboflavin, niacin, or pyridoxine.

17. The extracellular vesicle of claim 2, wherein the vitamin is vitamin E (tocopherol or tocotrienol).

18. The extracellular vesicle of anyone of claims 1-17, wherein L₁ is a cleavable linkage comprising a phosphodiester bond or a non-cleavable linkage comprising a phosphorothioate bond.

19. The extracellular vesicle of anyone of claims 1-18, wherein L₂ is an optional cleavable linkage comprising a phosphodiester bond or a non-cleavable linkage comprising a phosphorothioate bond.

20. The extracellular vesicle of anyone of claims 1-19, wherein L₃ is an optional cleavable linkage comprising a phosphodiester bond or a non-cleavable linkage comprising a phosphorothioate bond.

21. The extracellular vesicle of anyone of claims 1-20, wherein the SP₁ optional first spacer and/or the SP₂ an optional second spacer independently comprise an alkyl spacer, a glycol spacer, or a combination thereof.

22. The extracellular vesicle of claim 21, wherein the alkyl spacer is C1, C2, C3, C4, C5, C6, C7, C8, C9, C10, C11, C12, C13, C14, or C15.

23. The extracellular vesicle of claim 21, wherein the alkyl spacer is C3 or C6.

24. The extracellular vesicle of claim 21, wherein the glycol spacer has 2 (diethylene glycol), 3 (triethylene glycol), 4 (tetraethylene glycol; TEG), 5 (pentaethylene glycol), 6 (hexaethylene glycol; HEG), 7, 8, 9, 10, 11, 12, 13, 14, or 15 glycol units.

25. The extracellular vesicle of claim 21, wherein the glycol spacer is tetraethylene glycol (TEG) or hexaethylene glycol (HEG).

26. The extracellular vesicle of any one of claims 1 to 25, wherein each non-cleavable spacer is independently selected from alkyl, diethylene glycol, triethylene glycol, tetraethylene glycol (TEG), hexaethylene glycol (HEG), pentaethylene glycol, polyethylene glycol (PEG), glycerol, diglycerol, triglycerol, tetraglycerol (TG), pentaglycerol, a hexaglycerol (HG), polyglycerol (PG), succinimide, maleimide, or any combination thereof.

27. The extracellular vesicle of claim 26, wherein the polyethylene glycol (PEG) is characterized by the formula R₁—(O—CH₂—CH₂)ₙ— or R₁—(O—CH₂—CH₂)n-O—, wherein R1 is hydrogen, methyl or ethyl and n is an integer between 1 and 15.

28. The extracellular vesicle of claim 26, wherein the polyglycerol (PG) is characterized by the formula ((R₁—O—(CH₂—CHOH—CH₂O)ₙ—), wherein R₁ is hydrogen, methyl or ethyl, and n is an integer between 1 and 15.

29. The extracellular vesicle of anyone of claims 1 to 28, wherein the L₁, L₂, or L₃ cleavable linkage, or any combination thereof, comprises a redox cleavable linker, a reactive oxygen species cleavable linker, a pH dependent cleavable linker, an enzymatic cleavable linker, a protease cleavable linker, an esterase cleavable linker, a phosphatase cleavable linker, a photoactivated cleavable linker, a self-immolative linker, or any combination thereof.

30. The extracellular vesicle of anyone of claims 1 to 29, wherein the L₁, L₂, or L₃ cleavable linkage, or any combination thereof, comprises a self-immolative linker.

31. The extracellular vesicle of any one of claims 1 to 30, wherein the L₁, L₂, or L₃ cleavable linkage, or any combination thereof, comprises a cinnamyl group, a naphthyl group, a biphenyl group, a heterocyclic ring, a homoaromatic group, coumarin, furan, thiophene, thiazole, oxazole, isoxazole, pyrrole, pyrazole, pyridine, imidazone, triazole, or any combination thereof.

32. The extracellular vesicle of any one of claims 1 to 31, wherein the L₁, L₂, or L₃ cleavable linkage, or any combination thereof, has the formula:
-Aa-Yy-
wherein each -A- is independently an amino acid unit or a combination thereof, a is independently an integer from 1 to 15; -Y- is a spacer unit, and y is 0, 1, or 2.

33. The extracellular vesicle of claim 32, wherein -Aa- is a dipeptide, a tripeptide, a tetrapeptide, a pentapeptide, or a hexapeptide, or a combination thereof, wherein each dipeptide, tripeptide, tetrapeptide, pentapeptide, or hexapeptide in the combination can be the same or different.

34. The extracellular vesicle of claim 33, wherein a is 2 and -Aa- is selected from the group consisting of valine-alanine, valine-citrulline, phenylalanine-lysine, N-methylvaline-citrulline, cyclohexylalanine-lysine, glutamic acid-valine-citrulline, and beta-alanine-lysine.

35. The extracellular vesicle of claim 33, wherein said -Aa- is valine-alanine, valine-citrulline, or glutamic acid-valine-citrulline.

36. The extracellular vesicle of any one of claims 31 to 35, wherein y is 1.

37. The extracellular vesicle of any one of claims 31 to 36, wherein -Y- is a self-immolative spacer.

38. The extracellular vesicle of claim 37, wherein -Yy- has the formula: [chemical structure]
wherein each R₂ is independently C₁₋₈ alkyl, —O—(C₁₋₈ alkyl), halogen, nitro, or cyano; and m is an integer from 0 to 4.

39. The extracellular vesicle of claim 38, wherein m is 0, 1, or 2.

40. The extracellular vesicle of claim 38, wherein m is 0.

41. The extracellular vesicle of any one of claims 31 to 40, wherein the L₁, L₂, or L₃ cleavable linkage, or any combination thereof, comprises valine-alanine-p-aminobenzylcarbamate or valine-citrulline-p-aminobenzylcarbamate.

42. The extracellular vesicle of any one of claims 31 to 36, wherein -Y- is a non self-immolative spacer.

43. The extracellular vesicle of claim 42, wherein the non self-immolative spacer is -Gly- or -Gly-Gly-.

44. The extracellular vesicle of any one of claims 1 to 43, wherein the anchoring moiety [AM] comprises a scaffold protein.

45. The extracellular vesicle of claim 44, wherein the anchoring moiety [AM] and/or the scaffold moiety is Scaffold X.

46. The extracellular vesicle of claim 45, wherein the Scaffold X is selected from the group consisting of prostaglandin F2 receptor negative regulator (the PTGFRN protein); basigin (the BSG protein); immunoglobulin superfamily member 2 (the IGSF2 protein); immunoglobulin superfamily member 3 (the IGSF3 protein); immunoglobulin superfamily member 8 (the IGSF8 protein); integrin beta-1 (the ITGB1 protein); integrin alpha-4 (the ITGA4 protein); 4F2 cell-surface antigen heavy chain (the SLC3A2 protein); a class of ATP transporter proteins (the ATP1A1, ATPIA2, ATPIA3, ATPIA4, ATPIB3, ATP2B1, ATP2B2, ATP2B3, ATP2B4 proteins); a functional fragment thereof; and any combination thereof.

47. The extracellular vesicle of claim 45, wherein the Scaffold X is PTGFRN protein or a functional fragment thereof.

48. The extracellular vesicle of claim 45, wherein the Scaffold X comprises an amino acid sequence as set forth in SEQ ID NO:302.

49. The extracellular vesicle of claim 45, wherein the Scaffold X comprises an amino acid sequence at least 50%, at least 60%, at least 70%, at least 80%, at least 85%, at least 90%, at least 95%, at least 96%, at least 97%, at least 98%, at least 99%, or about 100% identical to SEQ ID NO:302.

50. The extracellular vesicle of any one of claims 1 to 49, wherein the biologically active molecule [BAM] is linked via an anchoring moiety [AM] to the exterior surface of the EV.

51. The extracellular vesicle of any one of claims 1 to 50, wherein the biologically active molecule is a polypeptide, a peptide, a polynucleotide (DNA and/or RNA), a chemical compound, or any combination thereof.

52. The extracellular vesicle of claim 51, wherein the biologically active molecule is a chemical compound.

53. The extracellular vesicle of claim 52, wherein the chemical compound is a small molecule.

54. The extracellular vesicle of any one of claims 1 to 53, wherein the biologically active molecule comprises an antisense oligonucleotide (ASO), a siRNA, a miRNA, a shRNA, an mRNA a nucleic acid, or any combination thereof.

55. The extracellular vesicle of any one of claims 1 to 54, wherein the biologically active molecule comprises a peptide, a protein, an antibody or an antigen binding fragment thereof, or any combination thereof.

56. The extracellular vesicle of claim 55, wherein the antigen binding fragment thereof comprises scFv, (scFv)2, Fab, Fab′, F(ab′)2, F(ab1)2, Fv, dAb, and Fd fragment, diabodys, antibody-related polypeptide, or any fragment thereof.

57. The extracellular vesicle of claim 54, wherein the biologically active molecule comprises an ASO.

58. The extracellular vesicle of claim 57, wherein the ASO targets a transcript.

59. The extracellular vesicle of claim 58, wherein the transcript is a STAT6 transcript, a CEBP/β transcript, a STAT3 transcript, a KRAS transcript, a NRAS transcript, an NLPR3 transcript, or any combination thereof.

60. The extracellular vesicle of any one of claims 1 to 59, wherein the EV is an exosome.

61. The extracellular vesicle of claim 60, wherein the exosome is a native exosome.

62. The extracellular vesicle of claim 60, wherein the exosome is an exosome overexpressing PTGFRN or a functional fragment thereof.

63. A pharmaceutical composition comprising the extracellular vesicle of any one of claims 1 to 62 and a pharmaceutically acceptable carrier.

64. A kit comprising the EV of any one of claims 1 to 62 or the pharmaceutical composition of claim 63 and instructions for use.

65. A method of treating or preventing a disease or disorder in a subject in need thereof comprising administering the EV of any one of claims 1 to 62 or the pharmaceutical composition of claim 63 to the subject.

66. The method of claim 65, wherein the disease or disorder is a cancer, an inflammatory disorder, a neurodegenerative disorder, a central nervous disease, or a metabolic disease.

67. The method of claim 65 or 66, wherein the EV is administered intravenously, intraperitoneally, nasally, orally, intramuscularly, subcutaneously, parenterally, or intratumorally.

68. A method of attaching a biologically active molecule (BAM) to an EV, comprising linking an anchoring moiety (AM) to the EV, wherein the anchoring moiety (AM) is attached to the biologically active moiety (BAM) according to the formula:
[AM]-L₁-[SP₁]-L₂-[SP₂]-L₃-[BAM]
wherein:
[AM] is the anchoring moiety;
L₁ is a cleavable or non-cleavable linkage;
L₂ and L₃ are optional cleavable or non-cleavable linkages;
SP₁ is an optional first spacer; and,
SP₂ is an optional second spacer.

69. The method of claim 68, wherein [AM] is cholesterol-C6, cholesterol-TEG, tocopherol-C8, tocopherol, of palmitate-C6.

70. The method of claim 68 or 69, wherein L₁, L₂, L₃, or a combination thereof is a phosphodiester bond.

71. The method of any one of claims 68 to 70, wherein SP₁ is C3, C6, TEG, or HEG.

72. The method of any one of claims 68 to 71, wherein L₁, L₂, L₃, or a combination thereof is a phosphorothioate bond.

73. The method of any one of claims 68 to 72, wherein SP₂ is C3, C6, TEG or HEG.

74. The method of any one of claims 68 to 73, wherein L₁, L₂, L₃, or a combination thereof is a phosphorothioate bond.

75. The method of any one of claims 68 to 74, wherein [BAM] is an antisense oligonucleotide (ASO).

76. A method of increasing the load density of a biologically active molecule (BAM) attached to an EV, comprising screening a library of anchoring moieties (AM) attached to the biologically active moiety (BAM) according to the formula:
[AM]-L₁-[SP₁]-L₂-[SP₂]-L₃-[BAM]
wherein:
[AM] is the anchoring moiety;
L₁ is a cleavable or non-cleavable linkage;
L₂ and L₃ are optional cleavable or non-cleavable linkages;
SP₁ is an optional first spacer; and,
SP₂ is an optional second spacer.

77. The method of claim 76, wherein [AM] is cholesterol-C6, cholesterol-TEG, tocopherol-C8, tocopherol, of palmitate-C6.

78. The method of claim 76 or 77, wherein L₁, L₂, L₃, or a combination thereof is a phosphodiester bond.

79. The method of any one of claims 76 to 78, wherein SP₁ is C3, C6, TEG, or HEG.

80. The method of any one of claims 76 to 79, wherein L₁, L₂, L₃, or a combination thereof is a phosphorothioate bond.

81. The method of any one of claims 76 to 80, wherein SP₂ is C3, C6, TEG or HEG.

82. The method of any one of claims 76 to 81, wherein L₁, L₂, L₃, or a combination thereof is a phosphorothioate bond.

83. The method of any one of claims 76 to 82, wherein [BAM] is an antisense oligonucleotide (ASO).

84. The method of any of claims 76 to 83, wherein the load density of a biologically active molecule (BAM) attached to an EV is increased at least about 1-fold, at least about 1.5-fold, at least about 2-fold, at least about 2.5-fold, at least about 3-fold, at last about 4-fold, at least about 5-fold, at least about 6-fold, at least about 7-fold, at least 8-fold, at least about 9-fold, or at least about 10-fold.

85. An extracellular vesicle (EV) comprising an antisense oligonucleotide [ASO] covalently linked to the EV via an anchoring moiety [AM] according to the formula:
[AM]-L₁-[SP₁]-L₂-[SP₂]-L₃-[ASO]
wherein:
[AM] is the anchoring moiety selected from the group consisting of cholesterol-C6, cholesterol-TEG, tocopherol-C8, tocopherol, and palmitate-C6;
L₁ is a phosphodiesterase cleavable linkage;
SP₁ is an optional first spacer selected from the group consisting of C3, C6, TEG and HEG;
L₂ is optional phosphorothioate non-cleavable linkage;
SP₂ is an optional second spacer selected from the group consisting of C3, C6, TEG, and HEG; and,
L₃ is an optional phosphorothioate non-cleavable linkage.

85. The EV of claim 84, wherein the EV is an exosome.

86. The EV of claim 85, wherein the exosome is a native exosome.

87. The EV of claim 86, where the load density of ASO attached to the exosome is increased by at least about 1.5-fold.

88. The EV of claim 86, wherein the anchoring moiety [AM] is cholesterol-C6.

89. The EV of claim 88, wherein the average number of ASO molecules per exosome is 5032+/−386.

90. The EV of claim 88, wherein the average number of ASO molecules per exosome is between about 4500 and about 5500.

91. The EV of claim 88, wherein the average number of ASO molecules per exosome is between about 4500 and about 4600, between about 4600 and about 4700, between about 4700 and about 4800, between about 4800 and about 4900, between about 4900 and about 5000, between about 5000 and about 5100, between about 5100 and about 5200, between about 5200 and about 5300, between about 5300 and about 5400, or between about 5400 and about 5500.

92. The EV of claim 88, wherein the average number of ASO molecules per exosome is at least about 4500, at least about 4600, at least about 4700, at least about 4800, at least about 4900, at least about 5000, at least about 5100, at least about 5200, at least about 5300, at least about 5400, or at least about 5500.

93. The EV of claim 88, wherein the loading efficiency is 73% to 93%.

94. The EV of claim 88, wherein the loading efficiency is between about 70% and about 95%.

95. The EV of claim 88, wherein the loading efficiency is between about 70% and about 75%, between about 75% and about 80%, between about 80% and about 85%, between about 85% and about 90%, or between about 90% and about 95%.

96. The EV of claim 88, wherein the loading efficiency is at least about 70%, at least about 75%, at least about 80%, at least about 85%, at least about 90%, or at least about 95%.

97. The EV of claim 86, wherein the anchoring moiety [AM] is cholesterol-TEG.

98. The EV of claim 93, wherein the average number of ASO molecules per exosome is 3991+/−490.

99. The EV of claim 97, wherein the average number of ASO molecules per exosome is between about 3500 and about 4500.

100. The EV of claim 97, wherein the average number of ASO molecules per exosome is between about 3500 and about 3600, between about 3600 and about 3700, between about 3700 and about 3800, between about 3800 and about 3900, between about 3900 and about 4000, between about 4000 and about 4100, between about 4100 and about 4200, between about 4200 and about 4300, between about 4300 and about 4400, or between about 4400 and about 4500.

101. The EV of claim 97, wherein the average number of ASO molecules per exosome is at least about 3500, at least about 3600, at least about 3700, at least about 3800, at least about 3900, at least about 4000, at least about 4100, at least about 4200, at least about 4300, at least about 4400, or at least about 4500.

102. The EV of claim 97, wherein the loading efficiency is 56% to 79%.

103. The EV of claim 97, wherein the loading efficiency is between about 50% and about 85%.

104. The EV of claim 97, wherein the loading efficiency is between about 50% and about 55%, between about 55% and about 60%, between about 60% and about 65%, between about 65% and about 70%, between about 70% and about 75%, between about 75% and about 80%, or between about 80% and about 85%.

105. The EV of claim 97, wherein the loading efficiency is at least about 50%, at least about 55%, at least about 60%, at least about 65%, at least about 70%, at least about 75%, at least about 80%, or at least about 85%.

106. The EV of claim 86, wherein the anchoring moiety [AM] is tocopherol-C8, tocopherol, or palmitate-C6.

107. The EV of claim 106, wherein the average number of ASO molecules per exosome is 4241+/−722.

108. The EV of claim 106, wherein the average number of ASO molecules per exosome is between about 3500 and about 5000.

109. The EV of claim 106, wherein the average number of ASO molecules per exosome is between about 3500 and about 3600, between about 3600 and about 3700, between about 3700 and about 3800, between about 3800 and about 3900, between about 3900 and about 4000, between about 4000 and about 4100, between about 4100 and about 4200, between about 4200 and about 4300, between about 4300 and about 4400, between about 4400 and about 4500, between about 4500 and about 4600, between about 4600 and about 4700, between about 4700 and about 4800, between about 4800 and about 4900, or between about 4900 and about 5000.

110. The EV of claim 106, wherein the average number of ASO molecules per exosome is at least about 3500, at least about 3600, at least about 3700, at least about 3800, at least about 3900, at least about 4000, at least about 4100, at least about 4200, at least about 4300, at least about 4400, at least about 4500, at least about 4600, at least about 4700, at least about 4800, at least about 4900, or at least about 5000.

111. The EV of claim 106, wherein the loading efficiency is 57% to 73%.

112. The EV of claim 106, wherein the loading efficiency is between about 50% and about 80%.

113. The EV of claim 106, wherein the loading efficiency is between about 50% and about 55%, between about 55% and about 60%, between about 60% and about 65%, between about 65% and about 70%, between about 70% and about 75%, or between about 75% and about 80%.

114. The EV of claim 106, wherein the loading efficiency is at least about 50%, at least about 55%, at least about 60%, at least about 65%, at least about 70%, at least about 75%, or at least about 80%.

115. The EV of claim 84, wherein the exosome is an exosome overexpressing PTGFRN.

116. The EV of claim 115, where the load density of ASO attached to the exosome is increased by at least about 2-fold.

117. The EV of claim 115, wherein the anchoring moiety [AM] is cholesterol-C6.

118. The EV of claim 117, wherein the average number of ASO molecules per exosome is 2442+/−339.

119. The EV of claim 117, wherein the average number of ASO molecules per exosome is between about 2000 and about 3000.

120. The EV of claim 117, wherein the average number of ASO molecules per exosome is between about 2000 and about 2100, between about 2100 and about 2200, between about 2200 and about 2300, between about 2300 and about 2400, between about 2400 and about 2500, between about 2500 and about 2600, between about 2600 and about 2700, between about 2700 and about 2800, between about 2800 and about 2900, or between about 2900 and about 3000.

121. The EV of claim 117, wherein the average number of ASO molecules per exosome is at least about 2000, at least about 2100, at least about 2200, at least about 2300, at least about 2400, at least about 2500, at least about 2600, at least about 2700, at least about 2800, at least about 2900, or at least about 3000.

122. The EV of claim 117, wherein the loading efficiency is 27% to 46%.

123. The EV of claim 117, wherein the loading efficiency is between about 25% and about 50%.

124. The EV of claim 117, wherein the loading efficiency is between about 25% and about 30%, between about 30% and about 35%, between about 35% and about 40%, between about 40% and about 45%, or between about 45% and about 50%.

125. The EV of claim 117, wherein the loading efficiency is at least about 25%, at least about 30%, at least about 35%, at least about 40%, at least about 45%, or at least about 50%.

126. The EV of claim 115, wherein the anchoring moiety [AM] is cholesterol-TEG.

127. The EV of claim 126, wherein the average number of ASO molecules per exosome is 1728+/−264.

128. The EV of claim 126, wherein the average number of ASO molecules per exosome is between about 1400 and about 2100.

129. The EV of claim 126, wherein the average number of ASO molecules per exosome is between about 1400 and about 1500, between about 1500 and about 1600, between about 1600 and about 1700, between about 1700 and about 1800, between about 1800 and about 1900, between about 1900 and about 2000, or between about 2000 and about 2100.

130. The EV of claim 126, wherein the average number of ASO molecules per exosome is at least about 1400, at least about 1500, at least about 1600, at least about 1700, at least about 1800, at least about 1900, at least about 2000, or at least about 2100.

131. The EV of claim 126, wherein the loading efficiency is 19% to 33%.

132. The EV of claim 126, wherein the loading efficiency is between about 15% and about 35%.

133. The EV of claim 126, wherein the loading efficiency is between about 15% and about 20%, between about 20% and about 25%, between about 25% and about 30%, or between about 30% and about 35%.

134. The EV of claim 126, wherein the loading efficiency is at least about 15%, at least about 20%, at least about 25%, at least about 30%, or at least about 35%.

135. The EV of claim 115, wherein the anchoring moiety [AM] is tocopherol-C8, tocopherol, or palmitate-C6.

136. The EV of claim 135, wherein the average number of ASO molecules per exosome is 2979+/−1006.

137. The EV of claim 135, wherein the average number of ASO molecules per exosome is between about 1900 and about 4000.

138. The EV of claim 135, wherein the average number of ASO molecules per exosome is between about 1900 and about 2000, between about 2000 and about 2100, between about 2100 and about 2200, between about 2200 and about 2300, between about 2300 and about 2400, between about 2400 and about 2500, between about 2500 and about 2600, between about 2600 and about 2700, between about 2700 and about 2800, between about 2800 and about 2900, between about 2900 and about 3000, between about 3000 and about 3100, between about 3100 and about 3200, between about 3200 and about 3300, between about 3300 and about 3400, between about 3400 and about 3500. between about 3500 and about 3600, between about 3600 and about 3700, between about 3700 and about 3800, between about 3800 and about 3900, or between about 3900 and about 4000.

139. The EV of claim 135, wherein the average number of ASO molecules per exosome is at least about 1900, at least about 2000, at least about 2100, at least about 2200, at least about 2300, at least about 2400, at least about 2500, at least about 2600, at least about 2700, at least about 2800, at least about 2900, at least about 3000, at least about 3100, at least about 3200, at least about 3300, at least about 3400, at least about 3500, at least about 3600, at least about 3700, at least about 3800, at least about 3900, or at least about 4000.

140. The EV of claim 135, wherein the loading efficiency is 37% to 68%.

141. The EV of claim 135, wherein the loading efficiency is between about 30% and about 75%.

142. The EV of claim 135, wherein the loading efficiency is between about 30% and about 35%, between about 35% and about 40%, between about 40% and about 45%, between about 45% and about 50%, between about 50% and about 55%, between about 55% and about 60%, between about 60% and about 65%, between about 65% and about 70%, or between about 70% and about 75%.

143. The EV of claim 135, wherein the loading efficiency is at least about 30%, at least about 35%, at least about 40%, at least about 45%, at least about 50%, at least about 55%, at least about 60%, at least about 65%, at least about 70%, or at least about 75%.

144. An exosome comprising an antisense oligonucleotide [ASO] covalently linked to the exosome via an anchoring moiety [AM] according to the formula:
[AM]-L₁-[SP₁]-L₂-[SP₂]-L₃-[BAM]
wherein [AM] is cholesterol-TEG; L₁ is a phosphodiesterase cleavable bond; SP₁ is C3; L₂ is a phosphorothioate non-cleavable bond; SP₂ is TEG; and, L₃ is a phosphorothioate non-cleavable bond.

145. The exosome of claim 144, wherein the exosome is a native exosome.

146. The exosome of claim 145, wherein the average number of ASO molecules per exosome is about 4780.

147. The exosome of claim 145, wherein the average number of ASO molecules per exosome is between about 4500 and about 5000.

148. The exosome of claim 145, wherein the average number of ASO molecules per exosome is at least 4500.

149. The exosome of claim 145, wherein the loading efficiency is about 80%.

150. The exosome of claim 145, wherein the loading efficiency is between about 70% and about 90%.

151. The exosome of claim 145, wherein the loading efficiency is at least about 70%.

152. The exosome of claim 144, wherein the exosome is an exosome overexpressing PTGFRN.

153. The exosome of claim 152, wherein the average number of ASO molecules per exosome is about 1659.

154. The exosome of claim 152, wherein the average number of ASO molecules per exosome is between about 1500 and about 2000.

155. The exosome of claim 152, wherein the average number of ASO molecules per exosome is at least about 1500.

156. The exosome of claim 152, wherein the loading efficiency is about 28%.

157. The exosome of claim 152, wherein the loading efficiency is between about 20% and about 35%.

158. The exosome of claim 152, wherein the loading efficiency is at least about 20%.

159. An exosome comprising an antisense oligonucleotide [ASO] covalently linked to the exosome via an anchoring moiety [AM] according to the formula:
[AM]-L₁-[SP₁]-L₂-[BAM]
wherein [AM] is cholesterol-TEG; L₁ is a phosphodiesterase cleavable bond; SP₁ is TEG; and L₂ is a phosphorothioate non-cleavable bond.

160. The exosome of claim 159, wherein the exosome is a native exosome.

161. The exosome of claim 160, wherein the average number of ASO molecules per exosome is about 4090.

162. The exosome of claim 160, wherein the average number of ASO molecules per exosome is between about 3500 and about 4500.

163. The exosome of claim 160, wherein the average number of ASO molecules per exosome is at least 3500.

164. The exosome of claim 160, wherein the loading efficiency is about 68%.

165. The exosome of claim 160, wherein the loading efficiency is at least about 60%.

166. The exosome of claim 160, wherein the loading efficiency is between about 60% and about 70%.

167. The exosome of claim 159, wherein the exosome is an exosome overexpressing PTGFRN.

168. The exosome of claim 167, wherein the average number of ASO molecules per exosome is about 1890.

169. The exosome of claim 167, wherein the average number of ASO molecules per exosome is between about 1400 and about 2400.

170. The exosome of claim 167, wherein the average number of ASO molecules per exosome is at least about 1400.

171. The exosome of claim 167, wherein the loading efficiency is about 31%.

172. The exosome of claim 167, wherein the loading efficiency is between about 20% and about 40%.

173. The exosome of claim 167, wherein the loading efficiency is at least about 20%.

The application's sequence listing, which the Patent Office published only in electronic form, follows.

SEQUENCE LISTING (1093 sequences)

SEQ ID NO: 1 - DNA, 32739 bp, Artificial Sequence
  Synthetic
ttttttaaaattaagaaaaggaatcaatttaattaaataccaaaaagttttacatattcctgaattttcaaccagctacaaaaagcatggatttttcttattagaaaacaaaactgttacaaaaaatttaaataaataaatagctgccataaaatttcaacataatatatagtcaactagttctgtgttatggtcagttaatagaaagatagcgggaatgatgatatgagcaaaagtaaacagaacaaagaagaaaaaagataggaaaaagaaagttagacagagaagagaaaaataaagaaagtgctttattgaatgagctaattacatgaggtcaccaagaggaacatcctctaactgaggcgctgtgatgacaacaacacccgatgctgtcattgtcctggtgtcttcctcaccctggcgtaaaggagatgcccaagctctgcacaggaaggcatcgtcggcaagctctcttctccgacactccaccggaaggatcacagagctgtggtcttggcctggatggatcgcagctctctccacctgagggcccccagctggagggaccggagaacactggcgtctggcagccccgtttccactcctaccaagaaggctcaaagacgacggtcagctcaggcttttcttcttgaagtgtttctaacgcactttttgtctcataattgaaatacatttcagacaacctgtaaaagcaaatagaaagcctgggttgcactcttcagataactctgtcagagtcgttaaccttaaaagtctcatctcttcatttccctaaactccacacacttctaaaatgtaaaaaaaaaaaaaaaaaaaaaagagggaccacaactcccagagtgctccgcgtcctcgccgccgtcgccgccgccgagaccaagatggccgcgagactccgcaccttcttcaagaatgcctgggccaaggagccggtgctcgtcgtgtccttcgtcactgggagcctcagacccccaggaccccagcctggagtggctgaagaaactgtgagcacctccaatgacagaggaggcccctcccacggctcccaataaaaatgtggggaaaaaaaaaaaaaagctctaagtgcccaatgtggttcctgttatatttttaactatctagttgggaaaatgttaagcatacataaaagtatagaaaatagtataatgaaccccctgtgtccattacccaagttcgacaattaaacaggtcatgtcaacttgtttcttctattgcccacccactcctcccacccatggattattttaaatactgcatttaatgcatctatcaataattcactttgtgacactaaaatataattacaatgtcactatcacaccaaaatcgtttaacaataatttcttagtatcactgtatgtccagtcagcatttacgcttcctcaactgtcttgtaaatttttttaccttatgttcatttagtcactaacctgatcaattctacacattgcatttgcccaggatgcctctcacatcttcgatgtaagttcttcctcctctttaataaagtttcccttgcaacttaactaataaatccacccatttgtcctgcaccatttataaccatctcaatttggtggtgttatatactgaatgtttgtcttccttaacaattcccatgatgaagcccgaacccctaatgtacggtacttaaaggtgaggcccttgggaagtagttagagttagatgaagttgtgagggtggggccctcagtatggggtgagtgcccttacaggagagatatcagagagtttgttctttctcccctgtcttctctcccttgcctcccctccctccatgcaatcacataacaagaaggtagccatctgcaaatcaggaagaggactctcgccagcaaccaaattcatcagagacttgattttggactttctagcctccagtattgtgagataataaatctgtgtttgagtcacacagtctaaagcagcttgttatcgcagcctgagaaaacgggttgattgcattcatggattcttcaatctattttgagcctgtccctcagcctgggtccagaatgtccctcagggctaggtcagtgatgctacatgtagcagtgtccccagctttgacctgaccaatcctttgtttgttcccccatctctcttagctctgggaatattggcttgtcctgcagcaaatgtgctccattatgttggcacaaggatgcaaggctgattcaaacttgtatttattcaaacctgcattccaacaagttctcagccttgagatcattaatatggacagaagtccctggactaatggaatttatattttgggagcagagatagataataaataaacaagaaaatgacatagcacataagatgtgctacactgcagaggagaatgagaagagaagaaaaagtgcttctattttcagtagaatagtcaaagacagcctcgcagagaagacctttaagcagagaatttaggaaggtacagggaataatgcaggtggatactgaaggggagagagttctaggccagaagaaaagcaagtgcaaaaatccagagatgacagtgttcttgcaaaacagcaaggagatcactgtactggggcagaataagcaagggttgggagaagcggaatcttcggaagcaggagaggctggattatgtggggcatggaagccaccatgagtttgttgctctgattatgaaagtgataagaagacgatgttgacaagagtgatatgatgcgagttacgttttagctgaatcccttgtctgctaaaatcagaataacagatgcagggtgacctgtcagaatgccaccatgacaatccagacaccaggtgatggtggcttgagccaaggaagaagccgtgaagctggcctgaagtggtcagggagtggccaagctgggaaggcagagctcacaggatgtgctgacacattggacatgattataaggaaaaagagacagtgacgacagaaccagaaatgttttggcccgagcaacttggaggaagtgaccatcgactgaaatggggaagaatcaggtttcgggtagaagagagtagcaagggtgtggatctagatgtgacgtttgagaggtttattaaaccttcaagaagaaagatcagccaagcacggagacacagaatttatggacatataatctggaggccacagcacacatatcatgaagccagaagaccagataatttaaatgagggagaaagtgtagggaagaaaaattagcccagcgactaagctctgaggattcaacacataagggtcaggatgatgaagaagaggccagaaaggagactgagtagaaggatctgatgaaataggagaaaacccaggagagcatgttggccttaaagccaagcagtgaaaacgtcttcagggaaaagtgcaatcatcacggctgacagaaccgtgggactcgccaggaagctcttgctagagaggagacgactacctcagtagtatcacagaggtgggctggcaatatcctgacacactgtcgaatttcgtgtaatttcccatcttgctattcctggagcactcttttcccatttagaaatcctcagaaaccgccaggcacggaggctcacacctgtaatcccagcacttggggaggccgaggcaggcagatcacgaggtcaggagatggagaccatcctggctaacacagtgaaaccccaactctactaaaaatacaaaaaattagccgggtgtggtggcaggcgcctgtggtcccagctacttgggaggccgaggcaggagaatggcgtgaacccgggaggcggagcttgcagtgagccgagatcatgccactgcactccagcctgggcgacagagcaagactctgtctcaaggaaaaaaaaaataaatcctcagaaacaaaacaacaagatccccactatgtaaagacccttccaatttggatgacccatagacgagttctacgaagttcggttccttgtgtagaacagaatcctccttggccatgatcgcatgagggcttgtgtttctttggggaatgtgggtgaaatccagcttagccttggtgattctaaccatctcagtgaagtggaatgtgtagtttaaccccatattctctattttaaaatatccaccacaactgacccaggcccaacctaatcttgagtggctgcaaatgaagcgagagccatcctggattttgataacagtcaacgtttcctgagaactcagagtcccaccacgggcatctctgcagagcacactcaccccaggttctgcaggaggcagctctgctgtttcagcacttcacagaacatcatgacccccaggtcgcccaggtcattgttgcccaggctcagctttcgcaggctctggctggaggtcagaagtgtggaaagatcccagcagcagtgtgacgtgaggttgcagttgtctaatctgcaaaaagggggtgatttaaagaaaatgtccccttaaccatccccctagctccccaagattttagcatcttagcctgtcttgtttcaggtggaaaaaaaaaaagcacaggagcacaggactaactagcttcaagcagccttgtatgctggtaattattcttctctctctttttcaaatccactgcattgcacagatcaaattagtaacagtggtttgttcattgatttaccaaattctgtgcctttccctacatttccataaaatgtaagtgtcatactgccctccttgttttgtggtacagaaaactgtgatggtaaggactcaagttcctacatctatatcatctggaaggactcctcccagtcccatgatcctgtaacaaggcaaacactaagaagacacctcacttctaagatacagattatcttgtggccactctgcctaaacgtccctccacccttggccaccatgtgttctcattgctgtaataaaccaaaggacttactccaacacctgaagcttgcagtcggggtgcaagagtccctcacagagtagtttgatccccttgtctccgagagtgttgcctcgcaggtaaaggtgcgtgagattctgattagtgctgagtaccgaggacaaagctgaacaacagactgacgtaaggccagaattcaccaacctgtagaaggacagggagaagagtcctcagtacccagctgttccccaacattgtgcagctgctttgactcagtgcctcgtcctctctcagcagctgcagccttcagctcagagagcaggagccagcatctcagatatgatctggggagagcaagacctgctgtctctggctgtcacaggagacacaaatgatgtctcagcagatgctttgctgtatgagtccgacagaaagagccaaggcaaactgagccagttaccccatactcctcctcctcctcacacagctttcctccggccaggagtgctcctcagcaccacttcttccagaaacacatcccagtggttatcctcaactaataatccccgtaacactgcagacacccacactgcaggggcctttttttttttttttaagagagacaggaaaaaaaaatcctcctcatgggaagtcggtgctgatttaaacatcaaagacaacaggtgaacgtccattgtgaccttctaagctgtagctagggctgtgacaggaacacggcggggcccttagcaattgccacctcccgccttcctgcgcccccaaatgcccctttcacatctttctcgctgcagccctcaaccacgttggagaggtgggaggatcgcttgagtccaggaagtcgaggctgcagtgagccatgattgcgctgccacactctagcctgggtgacagagtgagaccctgcctaaataaataaataaataaggccaggtgcagtggcttatgcctgtaatcccagcactttgggaggtccagcactttgggagggtggatcacgaggtcaggagttcaaaaccagcctggccaacatggtgaaagcccatctctactaaaaatataaaaattagttagggtggtggtgggcacctgtaatcccagctacttgggaggctgaggcaggagaattgcttgaacctgggaggcagaggttgcagtgagccgagattgccactgcacttcaacctgggcaacaaagtgagactctgtctcaaaaataaataaataaatagaaaaagccaggctcttgctcagtcacccaggccaagtgcacagctcactgcagtcttaaactcctgggctcagacaatccacccaccttggcctcccaaagtgctgggattacaggcatgagccactgtgcctgacccagagaccagtcttatttgattattatatcaacctggcaaggaaggagtgcagctaaaactattacatacattttacatattagaaatctaaggcttataaaaattacatgtttctctcaaggccacagagcaggtgtgtggtggggagggatccagacctggactttccaccttttagtctcatcttctccccactgccctttctgtccacctctctcttccttctgcacagcaaaaggccttttagagcataaaaccccaaaaatgcatcaatctcgatggaattaagagttttgatgtactattcttgagtcaaattaagcccattctatcacccaggaagagcataagagctctaaaatcactggtggcgtaattcctaggagcacagatgcttctattccatgaagccaggaatagcgcaggtgattgcctccttcctgccagagtccttggcaatggcatgttttttaagctctttggtgtctacgaggcaggaaaaatagaaatacagaaaaagtgtattcagacagtaaagcatgaacagatgaccagcaggaaaaagtgattatccatccactggtttctatcttcccaattaaggaagagtcaaactgaaaagacacagtaagtaagactaataggcaaatgaagcccaagagagacagacaaaaacaaagcaagttttgagtggcttctactaagctctcatccccggtaagaattctatcagagggttgttgttaattaacatgcagaagggattagtagcattcctggcaaaggccagggacattctagtagaatggggatggtcttcaaagaggaaaagagaaaatattttttaaattatgtaattaaagttatgcaggctttaccactatttccaaaaaggagtagaatggattattcaacagatgtttggggagcactacacagtagtagtagaaattgcaacagacggtgcagttttgttaagaaaacgtcatatccaaattgtgaaaatgctggtaactattaagcaacggttacactgaacacataataaaatgtttaaagaatcaaacaaccatgtcccaccaaccaatccttggattagaggaatgtgattgacatctcgatttcaaccaatccacctaactgagctctacatttaccaagcacggatatcttgccatgtactgtattaagttaattggttggggatttttatttattaactacctgcctatgtcacaaaactgtctcataatgaaaactgaatcccagtgctttgggaggccaaggtgggaggaccacttgaggccaggagtttgagaccagcctgggcaacatagcaagaccctgtctctacataaaaaattttaaacattttaaacattacccaggcatggtagtacacacctgtagtcctagctagtcagaaggctgaggcaggaagattgcttgagcccaggagagttcaaggctacagtgagctatgatcctaccactgcactccagtctgagccacagagcaaaaccctgtcttaaaaaaagaaaagaaaagaaaggaaaataaggaaaggaaaggggaaagggaaaggggggggggaggggaagggaagggagaaagagaaagaaagaaagagagagagagagaaagaaagaaagaaagagaaaaagaaaaagagagaaagaaaggaggaggaggaagaaggaaggaaggaaggaaggaatctgaagaagaagatcaaacattttttgagtatttattgtgtgcttgacatggatgacgactttaaacagggttatctcattgaatgatcacaacctcaagatgggaatgttagttttatccctgcttttaaatggacaaaatgaggatcacagtaattaaaaaataagtaggagcttcttagatggatagtagaaagtgggaaagtgggggtaaccttccaggcaaaaggaaaagagtagcaagaataaggaagattaaaagaaccaccaagatgtttcaaaactaattcatagctgggcacagtgatgtccacctatagtcccagctacttgggcggctgagacgggaggattgcttgagcccaggagtgcagatgagatcaggcactctgggtggtatggctgtagatgaacccaggaattcaaattcagcctgagcatcatagcaagtccccatctctaaaacagcaaaacaaaactcatccaatatgactcaaaatggagtgcaaggtatggcaggagagagggcagtatcagggacagccttgtgtgccaagctaagatgtcactctgactgcagagaagaacttttgaagatttttgaacaaagggtcaatattttcaaatttgcatcttaaaaagttccctctggtgtagtgatgagtggtagagggaaccgaaagcagagcatttaggaccgtcccccgtttactcactcagcagcctcctggaaagccccactattcaatgaggcaggaggaagagggcaggagcaggtcagagaacgggggtggaaggtggggtatgataattaaaccaatgttgcaaatgctcagcatgtgtgacccttgagcagtattgagacaggcagtacacaatatgcagccagagatgaggacccaaagttcgagagaaaaaaatgtagctatacctaacacataggctatacctaacacataggctatacctaacacgtaggctatacctaacccataggctatacctaacacacaggctatgcctaacccataggctatacctaacacacagccacatgtatggctgtacctaacacataaaatgcataaaagtctcgactgattaatgccacttatagatacctatctcaaagcaaatacacatgcataaaactatatatacaaatgtgctttttgcagagttgtttgtaatagtggaaaagaacagttatcccaaaatgcatgatttgattaaataaattatggtaaagcacactatgggatattatgccccaatcgatagatctacacaaatcagcatggaaatttatccatgataaatgaaaaaaggatatcacagaaaaatatttatattatggttctagtttcaatagatagggtgttatggattgaattgtttcctctaagactttatatgtggaagtcctaggccccagtacttcagattgtgaccttatttggtgatacggttactgaaaatgtaattagttaagatcaggtcgttacaaatctaacatgacttgtgttctttcacagggaaacttgggacatggagaaagacacacacagacacagggaagacaccacgtagagataaaggcaatggtgtggcagaggcatctacaggtcaaggaatggcaaaatgtgtcagcaagatgacattccaccagaagccaaagagaagcatgaacagattccccacagccctcagaaggacccagcctgctagcatcttaatctcacacttctggcctccagaactgagggacaataaatttctgttgtttaagctgctctgtttgtgatactttattacagtagctctaacagactaggcatttaaaatactacataacaatgtattacaaatgcaacatgaaaatcacataggtcttcattcacattactgatataaataccacccagatcagcatatacaggaaatccatttgtccataattagcaaccaatatatgttcacaaagctctgatactcccttggatggattgatggatggatggatggatggatggatggatggatggatggattgacggatggaaaatagagggatggatgatggatggatggatggatggacagatgaatggattatataacaatctattgtattaaaaaaagtctggatggttgttcatcagactattgtaaatggctctctcagaagagggctgagaaggagctttcactttccactttgtctgtactatgatatgtttacaccaagcatgtgttacttttctaataaaaagtttgtgaatgatatctgggtttgagacctactgttgttgaaattgagaggtatatgagaattctcagggagtttagaaatatttagtaacaacaacaacaaaaaaggtaaaccaggcgggtgtgtggctcacgcctgtaatcccaacactttgggaggccaaggcaggcagatcacctgaggtcagaaattcgagaccagcctggcaaacatggtgaaaccccgtatctactaaaaatacaaaaattagccaggcatggcagtgcacacctgtagtccctgctactcagaaggctgaggcagaagaattgttggaacccgggaggcagaggttgcagtgagccaagattgcgccactgcattttagcctgggtgacagagtaagactccaactcaaaaaaaaaaaaaaaaaaaaaaacacaactaaaccagtcgtgaaatccccagaccacaggaagagaagccaatgcaggatccagggagggggaagctataacattagcaggaaagactaagtagtgacctaaaaataagagcgaagaaggcttccaaagaggaagagtgaaatgaattaaaggcagcagatgtcaactaaagtaaggactgggaaggacctgtacgacctataaggacccagcctgctgatgcctcagtctcagactttggcctcctgaactgagaggcaataaactcttgttgtttaggccgctctgtttgtgatactttattacagcagctctaccaggttaggtattgacaatagtaactacatagagcatattacagatgcatcaggcacatttgtaattggcttgtttgtcatgtggaatttggaaccaggatcactgagagtcacctgagtgcctacgcctgggcctcttcggttccatctgctttgcctggagggctcttccggctccttcacagcccatcccacgcttcactgagcacctgctccaatgtcacccgctcggagaggcactcgccaaacgtgagcagagaagcacccctcgccgtcactccagtttttcttatagctcttatacacagggtatattgtttagcatgtctattatctgttatcacttccctaaaagaacggttgtgaaaacaggattttggtctgttttactcactgctgctgtcagtgcccaccacagagcccccagagggcctgcaaaatgaagggacaaaatcatgtctgttgaacaaacttagagaagcagaagtcaaattgccaaggaagagtaatattctaaggcgatttgctaaggaagggtaataccctaaggcgaggaaatgaaggcactgcaggaagacttcatagaaagagatatggtcacatctgaggattggctgatgggagaggtccaaggaagtatcagagctttgtgaacagaggttggttgttaattatggattagtggattactcctctgggaagacctttcctgccaaattttgtcttgaatgctgatctggctggtatatatattaataatgtgaatgaatgaagacctatccaatttgcttattgtatttgtagatattattgtcagaatgaagattcaaaactgcctagtcaatgggtcaaaagacaggtaagatgaggtttagcaaagctaaattggaggtcccacccttaagctgagagccagatgaagaagccctgtagagagcccattagcaacatctcctaaggcaatgcactgggaattaaggcagtggcttgggaggtcacagacgtttgtctacactgagttccactaccttctctctgagtgtccttggacaaagttatgaggctccctgaattttattttctcctctttaaattggagacacagataccctaccctatagcatctttctgaagccaactgagaaaatccatgtaagaacatgaaagagcaggtgatacagggaaagtgatacaggaaagtggtacagggaaagtgcatgattattagtgggtattccctactactgtttactgcagaattccaacatgaatcaaaaggcttatgtaactgccaaaaaaaacaaggaaatcagagattccaccagtgaaaccatagttctctgcaacaggaggtaaaacatccaccatgcatcatcaggtctgggcaccacatttcaaagacagacactaacaaaccagcctgtgtacctgggagagcatggctacataggtgaaggtgctgagccatgacactgttgaggatatagaggctgcagtgtaagagtcctctcctagtgtagaggctgcagggtgagagctctttcctagtgtagaggctgcatgcactatgcgataacttgcatgcttgcaagcatgcacacataaaatgggtgactattcatgtgagtgtcttggaagcaagtttttccctcaacaggcaattgggctgcaccatctctaaggtttcttccaacactaagaaactctagttctataatcataaattagcataaattatcttattagcagcagtatacattatatgcctccagtccttcaaagcatttctgatgtttttacctccttactctaccttcagctctgcctgaccaaagtaacccccatccacattttccaaataattcacctctgaaaagaagttacttttctggtaagacacccatgaagacttaccccagtttctgcaggttacactgtggattcttggctttttcacataaaattgcgactcctgagtctcccaaggcattctcccccacatagagtctggtcagggaatggctggtgctcaatactgatgcaagatcctgacaacatgctgatgtgaggcagcagctgaccaaccttccatagagatggcagaatgtcagtcatgtctctcacccacgctccaccatggacaaggaagcacccgtacctgccactgcctctactccagtttacacatggaaagggagtggacacaagctctatgtacacttctgatttccttttccatttggtggaataacaagtaagcattctccaagctcccaccaatactacatcttcccagctccctacattcagctttattgtggtaaaatacgtgtaaaataaaatttaccattttaaccatttttaagtgcacaattaatggccttaagcacttcacattgttgtgcaaccatcaccaccaccatctccagaactcctttcatcttgcagaactgaaactccataaccattaaacaatgtcttcccactctccgccctcccattgcctgcaaccacgtttcttcctgtctctatgaatctgtctgttctagacacctcctataaggacaatcagagtatttgccctttcgagtctagcttatcttacttagcataatgtccccgaggctcatccatgttgtagtgtgtactagaattctttttaaagctgaatgtacatatatagcacttttcaacacccttcatccgttgaaggacgtttggttatttccaccttttggctatttctaatagtgttgctatggacatagatgtacaaataacatgtttgagttcctgccttctgttttttttaatgcttcctctgtcacccaggcgggagtacagtgacgggatcttgactcactgcaacccccgcctcccaggttcaaaagattctcttgcctccaccccgagtaactgggattacaggcatgcaccaccatgcctggctaatttttgtatttttagtagagacaaggttttactatgatggccaggctagtctcgaactcccgacctccagtgatccacctgcctcagcctcccaaaatgctgggattacaggtgtgagccaccgctcctggctgagttcctgctttgaactcttttgcagatatacccagcagtggaaatgctggctccagtagtaattctgtatttattttttaggaattgctgtgctgttttccatagtggctgcatcatttacattcccaccagcaacacacaatggcttccatttctccgcacccacaccaatacttgttgttttctagttttcttgcttttgtttgataatagccatcctaatgggtgagaaatggcccttccatttttaagtggttttttctctccttcaaaatgcaagtctcccagaagcactcagggaagggctgcatacaacatcgagggtctgcattgctttagcaccatttttcttatacaatatgaggacccagggcttgtcatgaagttctaaaactcctctaaagcaatgcattacactgattttttctttttgtcagctaggcagtaggcaccctaaaggcagacatcttctttttgttattatttatgctccttgtcagggttgagtgtgtggctttccccacgacaaacactcactgaccgcaatgctagacaccccaagacaagcacacgcagtcacccgagccgccaaggccattctcactcaaaccccagcccaccgggcctcactgaagccagagtgcgcagcacgcctcgctggcagaacttccttaggggaacgggctcgactcaccagagcttcttcagattgcacaacaggtgcttcagtcccacacacagaagtctgattccgaagtcaccgagggcgttgtcactcaggtccagctccaccagcttctggttgctgctgaggaccaaggagatgtcgaagcagcactcatgcgagaggccacagcgccccaaccttcatgccaagaacagaggcagaaagcatcagaacacacctgaccagagagctccagaacagaggaagcatcaggacacacctgatcaggaagctccggaatagagaaagcatcagaacacatctgatcagagagctccggaatacagaaagcatcagaacacacctgaccagagagctccggaatagagaaagcatcagaacacatctgaccagagagctccagaatagagaaagcatcaggacacacctgacaagagagctctggaatagagaaagcatcaggacacacctgaccagagagctctggaatagagaatgcatcaggacacacctgaccagagagctccggaatagagaaagcatcaggacacacctgaccagagagctccggaatagagaaagcatcaggacacacctgaccagagagctctggaatagagaaagcatcaggacacacctgaccagagagctctggaatagagaaagcatcagaatacacctgaccagagagctccggaatacagcacaaggcacattgggaggtcagcccccagtctccccagtcacagcagagggatcacctgtcagtgaactcccggccgtaaacagtgccgggtgcattgagatcaccccccagacatgtgaatggtgcgctcctggtttgtaagtgaagcgggcggtgtgggcctgtgcacccacctccttccctcgtgttcctaaccattgacgtgcccgcagtcggcactgccctcgccagtgctgcactcagctatttcttgtcttcaccaacattgtcaccccattgtgtttgacgatttcatcccagccctccatctatattgaaaggaaaagcagctctgattctttttcttttcttttcttttctttttttaaagacagggtctcactttgttgcacaggctggagtgcactggcgagatcatagctcactgccacctcgaactcctgggctcaagggatccacctgcctcagcctcccaagtggctgcaaatacaggcatgtgctaccatgcttagccattttattttatttatattttatttttattattattattatcttctaaagacaaggtctcaccagcttgctcaggctggttttgaactcctgggctcaggtgatctgcccacctcagcctctcaaagtgctgggattccacatcccgctgcagctctgattcttgattagtttccccgtcacacacatgcacacaaacacacacgcacatcactaccaccgtcaccaccaccaccagcaacaaaaactatactttatccctgtcatgggggcaagaacaacattctagcttctttccagggcaatagttcataggtcctggagcctgttagaccaccttcctttctgtccctatccttacaccaacttcaagcaaatggacaaatggatctctacttctctgcgaagcatctcactgtcccctacccttccctgtttgtgtctgcctctccagaatcatacaggggcaatggcagtggggagagaatttgggcatgaagttggagaaataaggttaaatgtcccaaacaaccagtctccatggcactacgatttgaaatttaccaaaagagcaaagatgaagagtgtgatctatatacataatggaatactgctcagccatagaaaagaatgaagtcacatctttgaagccacacagatggaactggaggccattaccttaagtgaaacaactcagaaacagagtcaaataccacacgttctcacttacaagtgggagctaaacaaagggtaacatccatagagcatggaatgatagacactagagcctcagaagggtgggagggtgggagccaggtgagggctggaaaattatttattgggtacaatgttcactatttgggtaagagttacactaaggccgggcacggtggctcacgcctgtaatcccagcactttgggaggccgaggcgggtggatcacgaggtcaggagtttgagaccagcctagccaatacggtgaaaccttgtccctactaaaaatacaaaaatcagctgggcgtggtggcccatgcctgtaatcccaactactcgaagaattgcttgaacccaggaggtggatgttgcagtgagccgagatcactccactgtactccagcctgggcaacacggcgagagtccatctcaaaaaaaaaggggtagttacagtaaaagcccagacactaccactgtgcagtaacatatccatgaaacaaagctgctcttgcgccccctacatctacaaaaataaatacataaagtaaaaaataaagagcagagcagacagaaagcatttaagccaccgaacagcacaatcgaatcagaattttctaaaggaccatcttacttttgtgcagagaatggtcgggtgagggaaaaaggcagacacagggagaccaaagagccaacattcattcagtgcgtgcttttgaccactgatgggtactaagatgtctgtccaggcgtggcaaagatgacagcaagacaaacaaacgcaaaccccatccccggggagctgatggtctaggaggtcactgcgtgtccaggcaagtggtgacagttgctggacctgggctggtggggtgaggacgaggaaaagtggaaaacagctcgggtaggaggaaaaattgataagactggtgacaaggtgagtgtgttgagccggagagggaggtagcaaaatgtcctagagtggcggactttaacacttgctgtgcagctcctcaaaaatgcagacgcctgcatgcgtccacagagcagggaatgaaacagagctagtgaggcggcccaggcaccagcgcggtggggcgtgtgaatctgattcatggtgtgggagaaagcaagcacattttttattattattattattattattattttgaaatggaatctcgctctgtcacccaggctggagtgcaatggcacgatctcggctcactgccatctccgcctcccgggtacacacagttctcctgcctcagcctcccgagtagctgggactacaggtgtgagcaagcacattattaataaagtcacaggagattccctgtgacatttcaacccatacaaagcattctgaccaggctgggcaacgtgatgagaccacatctctacaaaaaaaatacaaaaattagccagcatggtggtgcatgcctgtagtcccagctactcgggggagctgaggtgggaggattgcttgagcctgggaggtcgaggctgcagtaagctgtgatcacacactccagcctgggtgacagagagaggtcctgtctcaaagaaaaaaaaaaaaagtattttcatagtttttaggtgaggttgccattgttgtaaatggcaaattctccaactctcatctatgaacatggcccatgaggaaatggaatatatcgagcatcatggttgtttcaagaaatgactttttttttagttcctcattcattcttccccacacaaaacttccccagctggcctccaacccattctaccttctcacttgttctgggctgaactgtgcccccccaaaaatttacatgttgaagccctaatcctcaagacctcataatgtggctgttttgggaaatggggtctttaaaggagtgactagattaacattaggtcttgtgtagtcatgcctgactgtgcctaatccatcaggactgctgtccctgtaagaagaggagactaggccactcttccccccaaggcaagatggcatcagtacacagggagaagggggcatctacaaaccaaggagggcggcctcagaagaaaccaaccctgctgacaccttgatcttagactttcggcctcagaactgcaagaaaatgaatttttgttgttgaagccattcagtctgtggcactttgttacagcagaaaccacaccaccggccgggtgcggtggctcatgcctgtaatcccagcattttgggaggccgaggcgggcggatcacctgaggtcaggacttcgagactagcctggacaacatgatgaaaccccatctctactaaaaatacaaaaaattagctgggtatggtggtgggtgcctgtaatcccagctactcaggaggctgaggcaggagaatcacttgaacccaggaggcagagattgcagtgagccgaggtcacggcattgcactccagcctgggcaataagagcaaaactctgcctcaaaaaaagaaaaaaagaaaaagaaaagaaagaaaccacaccagcaacctggtcctgaagatctttctccagtctgtttctctctctctctctcatatgaacttgcactcacacagatcacatgcacggggactcaccacaatctccgaatgttacagccaggatgctggagcgtttcacacaacactctcatccctgggtcccccagagaattgtcactgaggtccaattcagttagactctggctggtgctcagaactgaaaagaggccccggcaaaaactggaagtgaggtggctgttcaccaatctaggaattagaaggaagacagacagaaaagaaatcagcctcgaataataactaactggagctgggggccggggtgcctggcaccagttcagagaaatgccttccggggattaagaaatgggtcacgaaaccaaaaattgttcccagagaaatgaagagggctggatgagccttggtaaaagcagttctgcctcctctcggacggagagcatgagcctgtgactgtggcggactgtggcaccctacagcctgctccccagtgtcctcctctcgcccttaccagtccactgtcccaacatggccctgaacgttctgtgctgggtgatcagagggcagtcctcactcctggctacacaacagcatcaggagtgctcacaaaaatcctcaggccaggctgggcatggtggctcacacctgtaatcccagcactttgggaggccgaggcgggcagatcacctgaggtcaggagttcaagatcagcctggccaacatggtgaaaccctctctctactaaaaatacaaaaattaattgggtgtggtggcacgagcctgtcatcccagctattagggaggctgaggcaggagaatcacttgaacctgggaggtggaagttgcagtgagccaagatcatgccacagcactccagcctgggcaacagagcaagacttcatctcaaaaaaaaaaaaaagaaaaagaaaatcgcaagcccaggccacatccatggaaataaaatcagaagctctgaggtggaactagatgaattttttaaattttttttcagatgaaacccaagctggaatgcagtgccatgatcatagctcactgcagcctcaaactcctgggctcaagcaatcctcttgcctcagcctcccgagtagctgaggttacaggcacgagtcactgtgtccagctatatggatcttttttatttaaaaaaagccaggtggctccaacatgcagtcacatttttgcttttgtttttctgtagagaggtgctctcactttgctgctcaggtaggacttgaattcctggcttcaagcaatccccccatcttggcctcccaaaacctaggattacaggcaagagccactgcacccacacatgcagtcacctttgaatcacctgtagctctcattcaaatgcaaagtctagctctctaggtctaagattgggtccacaatcctgcatttctaatagatgctcaggcttctggttctcagaagggactggaacatacaaagcaagctcctgccctcagagtaaggcagctgccatctagaaagatgggtgctgagccccctaccagggctccagtcagagtctgtcctcagagtaaggcaggtgccatctagagggatgggtgctgagccccctaccagggctcccgtcagagtctgtcctcagagtaaggcaggtgccatctagagggatgggtgctgagccccctaccagggttccagtcagagtctgtcctgaggaaggaaggtgctatctagagaaatgggtgctgagcctcctaccggggcttcagtgagagtctgtcctcagaggaaggaaggtgctatctagagaaatgggtgctgagccccctgccagggctccaatcagagtctgtcctcagaggaaggaaggtgctatctagagaaatggttgctgagcctcctaccggggcttcagtgagagtctgtcctcagagtaaggcaggtgccatctagagggatgggtgctgagccccctgccagggctccaatcagagtctgtcctcagaggaaggaaggtgctatctagagaaatgggtgctgagcctcctaccggggcttcagtgagagtctgtcctcagaggaaggaaggtgctatctagagaaatgggtgctgagccccctgccagggctccaatcagagtctgtcctcagaggaaggaaggtgctatctagagaaatgggtgctgagcctcctaccggggcttcagtgagagtctgtcctcagagtaaggcaggtgccatctagagggatgggtgctgagccccctaccagggctccagtcagaatctgtcctcagaggaaggaaggtgctatctagagaaatgggtgctgagcctcctaccggggcttcagtgagagtgtgcaaaccttcctcacagatgtgtgatcttcataaggtctccctgccctctccaccttccacctcactcttaatgagtagttctgcctacttttctctctgtcttactcttcttctcccatttctatggtctgaatgtttgtgtgccccaaaatccatacgctgaaatcctaaccctcaacatgacgtatcaggcgatggggcctttgaggtgtggttaagttatgagggtggagccctcaggagtgggattgctgtccttaggaaagggaccccagagagctgccttgcctcttcaccatgtaaggacacagtgagaaggcaccatcgaccagggaacaggccctcaccaaacaccagatctgccagagcctggatcatggacttcccagcctccagaaccgtaaggtgaaccttccttttgcttataagccaaccagcctgcagtgttttgttatggcaacctgatgaatgaagacaactgtcttttttccagtcactcggaactgtttgctgccgtagaaaccgtaccctgctttcccacacctgccctctctctcaacaccgtaagcccccagcctggctgcccctttccttctctcactctctcactgcccatcctccggaagctggctgagcggggacacccacccgtgccccgctggtgaacaggttcgtccccttgtgctttggatactctgcaagtttccttgtcagagcccatgaccccctccccgacatctgcacttgtttccggactgtcccacagccagacctcaagtccctgtgaccaggacctgggtcttcaccaccactgcggccctgtgggcagtcagtccttcatggccaaaccatgactaggaaggtggtcctggtcatggtaatgtcaacggatcaagaaagctgaaactcattgttgcctgtggaagggccaagcctcctgtttcccttaattttgccccacgtcaagtgtcttctatccaggctaaactcacacatcacagggtggccaccttcctacaaccactgtgggtggtccttctgcaggaggcactgaacgataaacccaaaagggactcagaagtcaggtgactcaaccacttcattgcacagacttggccactagcttccaaccacccagcaagtgtgtgaacagacccgaaaacggggttttggcaatgcccagtgcagagcaacatgggggcctagaaagagggtctccacatttctgctctatttcccttgatttaccttcatcatgtttttttccaaggaaactgtgtctctctccactgtcacctgcacacactttttctcagactgcattcatgatttggctcataccagtcttcagtgcagaattcctttaatttcttctctatgcgcccaggtcccaccattccttaaaggaggcttagattgcacatttctaagaaacatccccccagcctccagctctgaggccctctgtcccctcgctcctgggacacagactctctggcattgttctgccccacagacattgactgactcttaggcactagtgctccaagtagcttacaagaaatttcagttgacaaatatttgtaggcaatcctacatcctacttaataccttgtgctaaactggcattccccaaacatttgttccttgttttattttttttttcctcatcccatttatccacctaccatacatcaatctttgctcatgaaggagtctcaaacagacagtggtggcattatgatgtagctgtggcaacagtatttggaagatagttgaaaagagatgagaggaggcaagcgccaagaagaagctggcgaggaagcaggaggaagcacctggaagccgagtttccttacccatgagaacaggcagcatgagaggagcttgggaggacacactgcaccatatcaaggtgtcggccttccttttcctcctcctcttcctccttgggcatgttatggagaaaccccagggacagtgactccacccgatgacagttctcaatgcaaaaggaagaaaccatgtggtccattctggtggagagattgatctcaatcttggggaaatagtccatggccctttgcacgaagtcctcctcctgcatctcgtacaaacagtagaacaattccagctggctgggctggatctgcagctttttagctttggctttcacttcaatccatttcagcagctccagcctgatttgctgagagatcttgcaacttaatttcttctccaagtaggaggtcctctcctggtttaccaggccaaagaggaaacgtacaacaaaaatcaaataccccttttcgaatttgccatagttttccagaaggactgtcacgtctcggctgggaagcttcaaacgactccctggaacgttcgtccttccttccttttcctcttccagcaggtagtacatggcggcaaagaactcctggaaagtcatgtggatgaagctgtagaacttctcgcagtccacttccttttggaacaggttcatcctcaggaaagcagacacatccgccttctgcagtccatgattcctgaggtcggactcctcaaacaggattttctggttccagattccatctgcagccaaagagcagagcccccagaggtgggcgcagaggccgtgctcctggctccctccccggggctgcagcaaactggaaaggaagaagacgtacaccgcggtggtggtcttggatgtctgggcaaggctcttgccactctccatctgctgtttcagtccagtgcacacgatccagcagaccagggggatgaagcacatggtgaagaggacctcgttctcctgaatcagactgaaggctgccctggcttgggcctcatcagagaagtacttgaagaagtactctttccttttggcctcggagaaacccaggatctccacatgccgaggatggtccagcaagtgctgcagtttctccagggccacaggtctcgtggtgatgagcagagaggcctcgggaagcagcttctttctgatgaggctgctcaggagaatgtctccccgctcggccttctgccagtcagtgcagagcggtcctatgtgctcgtcaaaggcaccttgcagctcatcgaagccgtccatgaggaagaggattctggagggttttctcacgatcttgtggatgggtgggtttgggtcggggcagcagctcatgatcaggtcccccaggctcctctgtgtcacaaggctcacctctcgacagtggatatagaacagatagtcaaacctgtcttggtagagtgtccccgacgcccagtccaacatcatcttcctggccaggattgttttcccaatccctgccgccccctggaacaccacggtgtgcacaggctcagaatgctcatcatcggggtcaaacagcaactccatcttaatgggactcacggggctctcacacgtcttggtcttgccgatggccagaagctcctgctccctctcctgctggctccggtgctccttgatgagacgcagtcgtgtgtagcgtttgttgaggctcacactctcacccagacgggcattcctgtcttcaatgcactggaatctgcttctcacgtactttctgtacttcttacggtaatctacggcaaagacaggaagttagggggaaagtatacacacatccacctgagatgcgctctcagctggggcctgtcatcggaagcgagtggtaaccggaatggagaaatggaaggtgcagctcctccccactgggtaggaaaggtgccgagaatctctggtgtcaagtttttaagatacacagctgagcagaaggcccatctctatgtgtagctaccagcccaaagatcatttgaatcaatcttattcctttaagtaatctgcatcctatgccttatcaaacttgaaacgcttaatcaccgccgctggctctgggactgcaagagccacacaaacatgaatttgtttcttcaactgacaatggatttcctgagacaggcctttgcattccaaagagcaggaacctatagtatggccaagttacccagctgctcagcttcccagagcctcctgaaccaggtcttaaaactcaactagaagcaccaccccagtcgcttacctttcttcattttacaaatagagattctcgaaaggtactccagtaaacccatccactcctcttcaatgctgtcttcctggcatatcacagtgggattcgaaacacgtgcattatctgaacctaaaagggaaaaaaaaggtgtcaaaacccagaactattatcacagaggatgcaattgaaacctggcctaatatttggcatgagagaggagaccccaaacatcccccaaatcaaaacatggctctgagttgcagaggacaggtatccagtcaaaagtctggttgggagcatttctgcactcctagtttcaaaacaacttctgctgtccacctgccaagcatgtgttcccactgtccccagtctcagaatctcttcctcaggcctggaaatcaatcagcaaacatgcgaagcaggctaagtttcttttaccctcgtttgcttttgcctgcccctggcagcctgattgtgagggcatctccaagctctcctatatccccaacacggctgtgggctaagaaaggtcacccttccctgaccgcagttccctgcaatccattttacacacgtcttctattgtcaagtctagatgtctggttcttcaagagtgagaacgaccagtctatttcgtgcctaatctagtggttgggaatcctggctgactttagaatcacccaggaagctttaaaaatatggacttcaggactgcacgcccagaggttctttttcagtccctctgaggtgaggcccaggaaccatcacatactaaaagctcccaggtgattccaacatgcatctgtgttgagaatcacaaatccaaacagtcactagatagcatatcttaagaaggcattctataggagaaattcaggttaggtaaaacaagagttagtcactaggggaaatatataagacagataacttcaggtgggcaggaatctacaagtaacataaatgattttttttttttttttgagacagggcctcactctattgcccaggctggagtgcaatgacacaatcatggctccctgcagcctcaacctcctgggctcaagtgatcctcccacctcagcctccagaacagctgggactattgacacgtgccaccacacctaactaatgtttgcattttttgtagagacaggttctcactatgttgcccaggctggtctcaaactcctgggctcaagcaatcctcccatcttggcctcctgaagtgctgggattacaggcataagccactgcgcccagcccataaaagacctctgacagctgtctacttggtaaccatatcacaaaataaaatccaaaaaatctaagccaaaaccaaaatcttattctttttttttaagagacagagtcttgctttgtttccaaagctggagggcagtggcatggtcatagctcactccagcctggaactcctgagctcaagtgatgcacccacttcagccacctgagtaactgggactcaggtaggagccatgacagtaaattagccaaagtctattacctaaaacctaaccccaccccaggaaacaaacaaacaaacttctaaccctagttataacttttctgcctcaaaatccagatatggaagcaaagacggtgtagtggttaagagccaggctttgatcagagacatgccctgctttttaccccagctctggttatggctagaaataaaccatgggccagttaggatctcttccaggctcacctcattcacttgcaggagggataataccagaagctgtttcatgggtttcttgaatgtgccataaaatccataaaaactgcttagcaaagtacttctacagttgtgattatgacactttcatttgggtatgtgagtatataagtactgacacaatgataattgctttatttacttagagatgaggtctccctatgttgctcaggctggttttgagctcctgggctcaagcgatcctcctgccttagcctcctgagtagctgggactacaggtgagagccattgcagcaactggtttctgacctcccccggctgcacactgctgtctgtttccccagtgtcattacacccacactgctgccctgccttaacatgtgtctccctatccactgactcatttgtactcctccttcccatcaccaccagctctacatcatcatcctgcaataccctgcccttctctgagccctacctttgcctagaacacaagacaaaagaaagaaccttatccccaatgtgtacatggggattaagagaatttcttttacattccaattcccaaagtggtggtgaaaggaaaggcttctgccccaaactccacggttcttcaaggagagaggctgccctctgggccataggaagcagaggcccaagcctgctgaccacacagcagatactggacaaaacatgtggtctgagaagctggatggagaattggaggcaggtctaggcactgctgagattcagataaagagggactaatcatggcaggtgcccagggggtaggtacagtctgcatcagctttttaaaggagttagagaaagcaaacagtttgcctccaccttctcatagcactaccgtgagaggggaaaagagaaaaaaccaagacaatacaagaaaaaaaaatttttttttgaaacagggtcttgctctttagcccaggctggagtgccgtggtgcaatctcagctcactgcaacctccactccccatgttcaagcaattctcctacctcagcctcctgagtagctgggattacaggtgcccaccaccacacccggctaattttttttgtatttttagtagagatggggttttgccatgttggccaggctggtgttgaactcctgacctcaggtgatccacccacctcagcctcacaaagtgctggaattacaggcatgagccaccatgcccggccatgatttaaaaaaaaaaaaatcatactaacttctgtgcatcaaaggacacagttaaccaaatgaaaagacaacccacagaataggagaaaatatttgtaaatcatatatctgatatggggttaatatctagaatacataaagaactcctacaaggcaacaacaaaagccaaacctggtctgaaaatgagaaaagaacttgaacagaactttctctgaagaagctctataaatggccaacaagcagtgaaaatgtgctcagcatcacttatcattagggaaacggaaatcaaaactacagtgagataccacctcacactcattagaatggctactataaaaaagaaaaaataaataaaaataacgtgttcttaggatatggagaaattggaacccttgtgtgctgttggtgggaaatggtgcagatggtatctaaaacagtagagcagttcttcaaaatatttaacagaattaccgtatgattcagaaatttcacttctgagtatataccccagagaattcaaagcagggtcttgaagagatatttgtgcaccaacactcataacagcattaacaataacaaaaaggtagaagtaatccaggtgttcatcaacagataactaaacaaaatttggtatatggtaccatggagtatttatacagtcttttttaaaggaagggaattccgacacatgctacaacatagttgaacccggaggacattatgctgagtgaaataaactactcataaaggaaaaaatgctgtatgtttccacttatatgaggtacccagagtagtaagattcacagagatggcaaatagaatggtggttaccagggctgggagaatgaggcaatgaggagttatcattcaatgggtgaggagtttcagttttgcaagatgaaaacagttctggagactggttgcacaatgtgagtgtacctaacactactgaactgtacatttaaaaattattacggccgggcgcggtggctcacacctgtaattccagcactttgcgaggccgaggcgggtggatcacctgaggtcgggagtttgagaccaacctgaccaacatggagaaaccccatctctactaaaaatacaaaattagccgggcgtggaggtgcaatgcctgtaatcccagctacttgggaggctgaggcaggaaaatcgcttgaacccgggaggtggaggttgcagtgagccaagatctcaccattgcactccagcctgggcaacaagagcaactccgtctcaaaaaaaaatatatatatatatatatataaagatggaaaattgtacactatgtgcacttggccacaattttttttaaaagtcttccttccactcaccccacttcggctcatctctttttgctttctcataaaggtctctcctgttgatcgcagcgaagatccacacggccatggcccacgccttctcctccccattgaagtcgatcattagcgtggctagatccacatggtctgccttctctgtctgacccctcgggagggggatgcagcccttctggggaggatagtcctctaagtgcatcttaaatttcttcaagtccacatcctccaggtcctccaggtacctggccagcttgcagcgggtgcttgccatcttcatctgcagctgttttcagggtccttaggcttcggtccacactaagataccaggcagtgaacacggcacacggatgagtcttttttaaagtctccactttgagagatataaattatcaaaaactcagcaaacagaaagaaaaaaatgtcacatgactgtaacaagtcaaaatctttaattttgaaaagttagccaaggccgggcacagtggctcacgcctgtaatcccagcactttgagaggccaaggcaggcagatcacctgagctgaggaattcaagaccagcctggccaacatggcaaaactgtgtctctactaaaagtacaaaaatgagccgggtgtggtggcgggcgcctgtaatcccagctactcaggaagttgaggtaggagaattgattgaacccgggaagtggaggctgcagtgagccaagatcacgccactgcactccagcctaggcgacacagcaagactccatctcaaaaaaaaaaaagttagccaaatgcttaccagaaagttctcctgttggctcgatccaggagtgtgtcctgagccatggaagaaaggtttccctatggagggaaaaatatgcaaacaaatccataaacaggattgtattacagtttacggtgaacaaccacttcacgatgccatcttgacccatcagcaagaaaatttttgtcccgttgattacggggctatgacattggacaaactcttcactattcctcaacttcagtttcctcatctacaaaatgagaaagcagaagagaatgttttcagttcctccaaactgaaggctctggctctttgcttctgtttttgtgagggaagagggatgagagacaatagaaggagaaggccaggaggtgagtaagtgtgttgataacagaacaggacgtggctagggagagaggagagagaacataaaagcttgcagaggaggggacagtctttgactgcacttctatcaaccagtggattgaagtgagatgaagctgggagtgcataatggagaataataaaaacatacatccctgtaatcccagcactttgggaggccgaggtgggcggatcacctgaggtcaggagttggagaccaggctcaccaaacaacagggagaaatcccgtctctactaaaaatacaaaaattaaccgggcatggtaccaggcacctgtaatcccagctactcgggaggctgaggcaggagaatcgcttgaacccaggaggcggaggttgcgatgagccaagatcacaccactgcactccagcctgggcaataagagcaaaactccatctcaaaaaataaaatagaataaaataaaataaataaaaacatacatcctttaatgtctccttgcaaaattcgcaattgttatcattataattcacattaatttagagctttccacaggctaggcactcactgatgtttttccccatctaacctgcacagagctctatgaggtgcacctattcctagccccattttatagatgcataaactgagtcttagggggactaggaagcctgccgaggggtttagaaccaggaaggaacagagccaggattttgaccagagatatgagaccatgtcttccatcacttgtttcagtcagacaaagacaaagacaacaaaatagatgactaaaagacacacttccccagcatttatcacaggtgtatcactgcagcattcaccaacatagtcttcccaactagactgtgagttccacaaaaactagcaatcacctgctgtatctttagatcttccatatctcctagagtccggatggatgaacaagttggctttgtttggaattgttccctccttgatcccttgattatactctatttggcaaagcacctcaacctaaagccataaataacactcaagggaggcagagagcctggaaaacggtggagctctccaaattggaatttctgtgactgcagttcaatgtcaagatgcctcagactcactcatctctcccgtcccatctccattcctgcctatctactcctcgcctcctgagccctgcaaacccagccctgtgcatcctgaggtgactgctctccagacagccctattagctccgcataccctcccagctcctgcccatcctgaggtgactgctctccagacagccctattagctccgcataccctcccagctcctgccccatcagtccttccatctgcatcaggattctgcctttcttctgtgctccttccaccctaacaccagcacaaaaatctgctgccctttggtctttaaggaggtttgtttccttctgtatatcccatccatcttctcccctgggagggatactgggcaaatctgctgaagtcgtgggtgtaaactatggttgctgccgctgtcctccccgcttccccccgccacatacacacacacgaacttgcacac

SEQ ID NO: 2 - protein, 1036 aa, Artificial Sequence
  NLRP3 Canonical
MKMASTRCKLARYLEDLEDVDLKKFKMHLEDYPPQKGCIPLPRGQTEKADHVDLATLMIDFNGEEKAWAMAVWIFAAINRRDLYEKAKRDEPKWGSDNARVSNPTVICQEDSIEEEWMGLLEYLSRISICKMKKDYRKKYRKYVRSRFQCIEDRNARLGESVSLNKRYTRLRLIKEHRSQQEREQELLAIGKTKTCESPVSPIKMELLFDPDDEHSEPVHTVVFQGAAGIGKTILARKMMLDWASGTLYQDRFDYLFYIHCREVSLVTQRSLGDLIMSCCPDPNPPIHKIVRKPSRILFLMDGFDELQGAFDEHIGPLCTDWQKAERGDILLSSLIRKKLLPEASLLITTRPVALEKLQHLLDHPRHVEILGFSEAKRKEYFFKYFSDEAQARAAFSLIQENEVLFTMCFIPLVCWIVCTGLKQQMESGKSLAQTSKTTTAVYVFFLSSLLQPRGGSQEHGLCAHLWGLCSLAADGIWNQKILFEESDLRNHGLQKADVSAFLRMNLFQKEVDCEKFYSFIHMTFQEFFAAMYYLLEEEKEGRTNVPGSRLKLPSRDVTVLLENYGKFEKGYLIFVVRFLFGLVNQERTSYLEKKLSCKISQQIRLELLKWIEVKAKAKKLQIQPSQLELFYCLYEMQEEDFVQRAMDYFPKIEINLSTRMDHMVSSFCIENCHRVESLSLGFLHNMPKEEEEEEKEGRHLDMVQCVLPSSSHAACSHGLVNSHLTSSFCRGLFSVLSTSQSLTELDLSDNSLGDPGMRVLCETLQHPGCNIRRLWLGRCGLSHECCFDISLVLSSNQKLVELDLSDNALGDFGIRLLCVGLKHLLCNLKKLWLVSCCLTSACCQDLASVLSTSHSLTRLYVGENALGDSGVAILCEKAKNPQCNLQKLGLVNSGLTSVCCSALSSVLSTNQNLTHLYLRGNTLGDKGIKLLCEGLLHPDCKLQVLELDNCNLTSHCCWDLSTLLTSSQSLRKLSLGNNDLGDLGVMMFCEVLKQQSCLLQNLGLSEMYFNYETKSALETLQEEKPELTVVFEPSW

SEQ ID NO: 3 - DNA, 4470 bp, Artificial Sequence
  Synthetic
gtagatgaggaaactgaagttgaggaatagtgaagagtttgtccaatgtcatagccccgtaatcaacgggacaaaaattttcttgctgatgggtcaagatggcatcgtgaagtggttgttcaccgtaaactgtaatacaatcctgtttatggatttgtttgcatatttttccctccatagggaaacctttcttccatggctcaggacacactcctggatcgagccaacaggagaactttctggtaagcatttggctaacttttttttttttgagatggagtcttgctgtgtcgcctaggctggagtgcagtggcgtgatcttggctcactgcagcctccacttcccgggttcaatcaattctcctacctcaacttcctgagtagctgggattacaggcgcccgccaccacacccggctcatttttgtacttttagtagagacacagttttgccatgttggccaggctggtcttgaattcctcagctcaggtgatctgcctgccttggcctctcaaagtgctgggattacaggcgtgagccactgtgcccggccttggctaacttttcaaaattaaagattttgacttgttacagtcatgtgacatttttttctttctgtttgctgagtttttgataatttatatctctcaaagtggagactttaaaaaagactcatccgtgtgccgtgttcactgcctggtatcttagtgtggaccgaagcctaaggaccctgaaaacagctgcagatgaagatggcaagcacccgctgcaagctggccaggtacctggaggacctggaggatgtggacttgaagaaatttaagatgcacttagaggactatcctccccagaagggctgcatccccctcccgaggggtcagacagagaaggcagaccatgtggatctagccacgctaatgatcgacttcaatggggaggagaaggcgtgggccatggccgtgtggatcttcgctgcgatcaacaggagagacctttatgagaaagcaaaaagagatgagccgaagtggggttcagataatgcacgtgtttcgaatcccactgtgatatgccaggaagacagcattgaagaggagtggatgggtttactggagtacctttcgagaatctctatttgtaaaatgaagaaagattaccgtaagaagtacagaaagtacgtgagaagcagattccagtgcattgaagacaggaatgcccgtctgggtgagagtgtgagcctcaacaaacgctacacacgactgcgtctcatcaaggagcaccggagccagcaggagagggagcaggagcttctggccatcggcaagaccaagacgtgtgagagccccgtgagtcccattaagatggagttgctgtttgaccccgatgatgagcattctgagcctgtgcacaccgtggtgttccagggggcggcagggattgggaaaacaatcctggccaggaagatgatgttggactgggcgtcggggacactctaccaagacaggtttgactatctgttctatatccactgtcgggaggtgagccttgtgacacagaggagcctgggggacctgatcatgagctgctgccccgacccaaacccacccatccacaagatcgtgagaaaaccctccagaatcctcttcctcatggacggcttcgatgagctgcaaggtgcctttgacgagcacataggaccgctctgcactgactggcagaaggccgagcggggagacattctcctgagcagcctcatcagaaagaagctgcttcccgaggcctctctgctcatcaccacgagacctgtggccctggagaaactgcagcacttgctggaccatcctcggcatgtggagatcctgggtttctccgaggccaaaaggaaagagtacttcttcaagtacttctctgatgaggcccaagccagggcagccttcagtctgattcaggagaacgaggtcctcttcaccatgtgcttcatccccctggtctgctggatcgtgtgcactggactgaaacagcagatggagagtggcaagagccttgcccagacatccaagaccaccaccgcggtgtacgtcttcttcctttccagtttgctgcagccccggggagggagccaggagcacggcctctgcgcccacctctgggggctctgctctttggctgcagatggaatctggaaccagaaaatcctgtttgaggagtccgacctcaggaatcatggactgcagaaggcggatgtgtctgctttcctgaggatgaacctgttccaaaaggaagtggactgcgagaagttctacagcttcatccacatgactttccaggagttctttgccgccatgtactacctgctggaagaggaaaaggaaggaaggacgaacgttccagggagtcgtttgaagcttcccagccgagacgtgacagtccttctggaaaactatggcaaattcgaaaaggggtatttgatttttgttgtacgtttcctctttggcctggtaaaccaggagaggacctcctacttggagaagaaattaagttgcaagatctctcagcaaatcaggctggagctgctgaaatggattgaagtgaaagccaaagctaaaaagctgcagatccagcccagccagctggaattgttctactgtttgtacgagatgcaggaggaggacttcgtgcaaagggccatggactatttccccaagattgagatcaatctctccaccagaatggaccacatggtttcttccttttgcattgagaactgtcatcgggtggagtcactgtccctggggtttctccataacatgcccaaggaggaagaggaggaggaaaaggaaggccgacaccttgatatggtgcagtgtgtcctcccaagctcctctcatgctgcctgttctcatggattggtgaacagccacctcacttccagtttttgccggggcctcttttcagttctgagcaccagccagagtctaactgaattggacctcagtgacaattctctgggggacccagggatgagagtgttgtgtgaaacgctccagcatcctggctgtaacattcggagattgtggttggggcgctgtggcctctcgcatgagtgctgcttcgacatctccttggtcctcagcagcaaccagaagctggtggagctggacctgagtgacaacgccctcggtgacttcggaatcagacttctgtgtgtgggactgaagcacctgttgtgcaatctgaagaagctctggttggtcagctgctgcctcacatcagcatgttgtcaggatcttgcatcagtattgagcaccagccattccctgaccagactctatgtgggggagaatgccttgggagactcaggagtcgcaattttatgtgaaaaagccaagaatccacagtgtaacctgcagaaactggggttggtgaattctggccttacgtcagtctgttgttcagctttgtcctcggtactcagcactaatcagaatctcacgcacctttacctgcgaggcaacactctcggagacaaggggatcaaactactctgtgagggactcttgcaccccgactgcaagcttcaggtgttggaattagacaactgcaacctcacgtcacactgctgctgggatctttccacacttctgacctccagccagagcctgcgaaagctgagcctgggcaacaatgacctgggcgacctgggggtcatgatgttctgtgaagtgctgaaacagcagagctgcctcctgcagaacctggggttgtctgaaatgtatttcaattatgagacaaaaagtgcgttagaaacacttcaagaagaaaagcctgagctgaccgtcgtctttgagccttcttggtaggagtggaaacggggctgccagacgccagtgttctccggtccctccagctgggggccctcaggtggagagagctgcgatccatccaggccaagaccacagctctgtgatccttccggtggagtgtcggagaagagagcttgccgacgatgccttcctgtgcagagcttgggcatctcctttacgccagggtgaggaagacaccaggacaatgacagcatcgggtgttgttgtcatcacagcgcctcagttagaggatgttcctcttggtgacctcatgtaattagctcattcaataaagcactttctttatttttctcttctctgtctaactttctttttcctatcttttttcttctttgttctgtttacttttgctcatatcatcattcccgctatctttctattaactgaccataacacagaactagttgactatatattatgttgaaattttatggcagctatttatttatttaaattttttgtaacagttttgttttctaataagaaaaatccatgctttttgtagctggttgaaaattcaggaatatgtaaaactttttggtatttaattaaattgattccttttcttaattttaaaaaaaaaaaaaaa

SEQ ID NO: 4 - protein, 922 aa, Artificial Sequence
  NLRP3-2
MKMASTRCKLARYLEDLEDVDLKKFKMHLEDYPPQKGCIPLPRGQTEKADHVDLATLMIDFNGEEKAWAMAVWIFAAINRRDLYEKAKRDEPKWGSDNARVSNPTVICQEDSIEEEWMGLLEYLSRISICKMKKDYRKKYRKYVRSRFQCIEDRNARLGESVSLNKRYTRLRLIKEHRSQQEREQELLAIGKTKTCESPVSPIKMELLFDPDDEHSEPVHTVVFQGAAGIGKTILARKMMLDWASGTLYQDRFDYLFYIHCREVSLVTQRSLGDLIMSCCPDPNPPIHKIVRKPSRILFLMDGFDELQGAFDEHIGPLCTDWQKAERGDILLSSLIRKKLLPEASLLITTRPVALEKLQHLLDHPRHVEILGFSEAKRKEYFFKYFSDEAQARAAFSLIQENEVLFTMCFIPLVCWIVCTGLKQQMESGKSLAQTSKTTTAVYVFFLSSLLQPRGGSQEHGLCAHLWGLCSLAADGIWNQKILFEESDLRNHGLQKADVSAFLRMNLFQKEVDCEKFYSFIHMTFQEFFAAMYYLLEEEKEGRTNVPGSRLKLPSRDVTVLLENYGKFEKGYLIFVVRFLFGLVNQERTSYLEKKLSCKISQQIRLELLKWIEVKAKAKKLQIQPSQLELFYCLYEMQEEDFVQRAMDYFPKIEINLSTRMDHMVSSFCIENCHRVESLSLGFLHNMPKEEEEEEKEGRHLDMVQCVLPSSSHAACSHGLGRCGLSHECCFDISLVLSSNQKLVELDLSDNALGDFGIRLLCVGLKHLLCNLKKLWLVNSGLTSVCCSALSSVLSTNQNLTHLYLRGNTLGDKGIKLLCEGLLHPDCKLQVLELDNCNLTSHCCWDLSTLLTSSQSLRKLSLGNNDLGDLGVMMFCEVLKQQSCLLQNLGLSEMYFNYETKSALETLQEEKPELTVVFEPSW

SEQ ID NO: 5 - protein, 719 aa, Artificial Sequence
  NLRP3-3
MKMASTRCKLARYLEDLEDVDLKKFKMHLEDYPPQKGCIPLPRGQTEKADHVDLATLMIDFNGEEKAWAMAVWIFAAINRRDLYEKAKRDEPKWGSDNARVSNPTVICQEDSIEEEWMGLLEYLSRISICKMKKDYRKKYRKYVRSRFQCIEDRNARLGESVSLNKRYTRLRLIKEHRSQQEREQELLAIGKTKTCESPVSPIKMELLFDPDDEHSEPVHTVVFQGAAGIGKTILARKMMLDWASGTLYQDRFDYLFYIHCREVSLVTQRSLGDLIMSCCPDPNPPIHKIVRKPSRILFLMDGFDELQGAFDEHIGPLCTDWQKAERGDILLSSLIRKKLLPEASLLITTRPVALEKLQHLLDHPRHVEILGFSEAKRKEYFFKYFSDEAQARAAFSLIQENEVLFTMCFIPLVCWIVCTGLKQQMESGKSLAQTSKTTTAVYVFFLSSLLQPRGGSQEHGLCAHLWGLCSLAADGIWNQKILFEESDLRNHGLQKADVSAFLRMNLFQKEVDCEKFYSFIHMTFQEFFAAMYYLLEEEKEGRTNVPGSRLKLPSRDVTVLLENYGKFEKGYLIFVVRFLFGLVNQERTSYLEKKLSCKISQQIRLELLKWIEVKAKAKKLQIQPSQLELFYCLYEMQEEDFVQRAMDYFPKIEINLSTRMDHMVSSFCIENCHRVESLSLGFLHNMPKEEEEEEKEGRHLDMVQCVLPSSSHAACSHG

SEQ ID NO: 6 - protein, 979 aa, Artificial Sequence
  NLRP3-4
MKMASTRCKLARYLEDLEDVDLKKFKMHLEDYPPQKGCIPLPRGQTEKADHVDLATLMIDFNGEEKAWAMAVWIFAAINRRDLYEKAKRDEPKWGSDNARVSNPTVICQEDSIEEEWMGLLEYLSRISICKMKKDYRKKYRKYVRSRFQCIEDRNARLGESVSLNKRYTRLRLIKEHRSQQEREQELLAIGKTKTCESPVSPIKMELLFDPDDEHSEPVHTVVFQGAAGIGKTILARKMMLDWASGTLYQDRFDYLFYIHCREVSLVTQRSLGDLIMSCCPDPNPPIHKIVRKPSRILFLMDGFDELQGAFDEHIGPLCTDWQKAERGDILLSSLIRKKLLPEASLLITTRPVALEKLQHLLDHPRHVEILGFSEAKRKEYFFKYFSDEAQARAAFSLIQENEVLFTMCFIPLVCWIVCTGLKQQMESGKSLAQTSKTTTAVYVFFLSSLLQPRGGSQEHGLCAHLWGLCSLAADGIWNQKILFEESDLRNHGLQKADVSAFLRMNLFQKEVDCEKFYSFIHMTFQEFFAAMYYLLEEEKEGRTNVPGSRLKLPSRDVTVLLENYGKFEKGYLIFVVRFLFGLVNQERTSYLEKKLSCKISQQIRLELLKWIEVKAKAKKLQIQPSQLELFYCLYEMQEEDFVQRAMDYFPKIEINLSTRMDHMVSSFCIENCHRVESLSLGFLHNMPKEEEEEEKEGRHLDMVQCVLPSSSHAACSHGLGRCGLSHECCFDISLVLSSNQKLVELDLSDNALGDFGIRLLCVGLKHLLCNLKKLWLVSCCLTSACCQDLASVLSTSHSLTRLYVGENALGDSGVAILCEKAKNPQCNLQKLGLVNSGLTSVCCSALSSVLSTNQNLTHLYLRGNTLGDKGIKLLCEGLLHPDCKLQVLELDNCNLTSHCCWDLSTLLTSSQSLRKLSLGNNDLGDLGVMMFCEVLKQQSCLLQNLGLSEMYFNYETKSALETLQEEKPELTVVFEPSW

SEQ ID NO: 7 - protein, 979 aa, Artificial Sequence
  NLRP3-5
MKMASTRCKLARYLEDLEDVDLKKFKMHLEDYPPQKGCIPLPRGQTEKADHVDLATLMIDFNGEEKAWAMAVWIFAAINRRDLYEKAKRDEPKWGSDNARVSNPTVICQEDSIEEEWMGLLEYLSRISICKMKKDYRKKYRKYVRSRFQCIEDRNARLGESVSLNKRYTRLRLIKEHRSQQEREQELLAIGKTKTCESPVSPIKMELLFDPDDEHSEPVHTVVFQGAAGIGKTILARKMMLDWASGTLYQDRFDYLFYIHCREVSLVTQRSLGDLIMSCCPDPNPPIHKIVRKPSRILFLMDGFDELQGAFDEHIGPLCTDWQKAERGDILLSSLIRKKLLPEASLLITTRPVALEKLQHLLDHPRHVEILGFSEAKRKEYFFKYFSDEAQARAAFSLIQENEVLFTMCFIPLVCWIVCTGLKQQMESGKSLAQTSKTTTAVYVFFLSSLLQPRGGSQEHGLCAHLWGLCSLAADGIWNQKILFEESDLRNHGLQKADVSAFLRMNLFQKEVDCEKFYSFIHMTFQEFFAAMYYLLEEEKEGRTNVPGSRLKLPSRDVTVLLENYGKFEKGYLIFVVRFLFGLVNQERTSYLEKKLSCKISQQIRLELLKWIEVKAKAKKLQIQPSQLELFYCLYEMQEEDFVQRAMDYFPKIEINLSTRMDHMVSSFCIENCHRVESLSLGFLHNMPKEEEEEEKEGRHLDMVQCVLPSSSHAACSHGLVNSHLTSSFCRGLFSVLSTSQSLTELDLSDNSLGDPGMRVLCETLQHPGCNIRRLWLGRCGLSHECCFDISLVLSSNQKLVELDLSDNALGDFGIRLLCVGLKHLLCNLKKLWLVNSGLTSVCCSALSSVLSTNQNLTHLYLRGNTLGDKGIKLLCEGLLHPDCKLQVLELDNCNLTSHCCWDLSTLLTSSQSLRKLSLGNNDLGDLGVMMFCEVLKQQSCLLQNLGLSEMYFNYETKSALETLQEEKPELTVVFEPSW

SEQ ID NO: 8 - protein, 1016 aa, Artificial Sequence
  NLRP3-6
MKMASTRCKLARYLEDLEDVDLKKFKMHLEDYPPQKGCIPLPRGQTEKADHVDLATLMIDFNGEEKAWAMAVWIFAAINRRDLYEKAKRDEPKWGSDNARVSNPTVICQEDSIEEEWMGLLEYLSRISICKMKKDYRKKYRKYVRSRFQCIEDRNARLGESVSLNKRYTRLRLIKEHRSQQEREQELLAIGKTKTCESPVSPIKMELLFDPDDEHSEPVHTVVFQGAAGIGKTILARKMMLDWASGTLYQDRFDYLFYIHCREVSLVTQRSLGDLIMSCCPDPNPPIHKIVRKPSRILFLMDGFDELQGAFDEHIGPLCTDWQKAERGDILLSSLIRKKLLPEASLLITTRPVALEKLQHLLDHPRHVEILGFSEAKRKEYFFKYFSDEAQARAAFSLIQENEVLFTMCFIPLVCWIVCTGLKQQMESGKSLAQTSKTTTAVYVFFLSSLLQPRGGSQEHGLCAHLWGLCSLAADGIWNQKILFEESDLRNHGLQKADVSAFLRMNLFQKEVDCEKFYSFIHMTFQEFFAAMYYLLEEEKEGRTNVPGSRLKLPSRDVTVLLENYGKFEKGYLIFVVRFLFGLVNQERTSYLEKKLSCKISQQIRLELLKWIEVKAKAKKLQIQPSQLELFYCLYEMQEEDFVQRAMDYFPKIEINLSTRMDHMVSSFCIENCHRVESLSLGFLHNMPKEEEEEEKEGRHLDMVQCVLPSSSHAACSHGLVNSHLTSSFCRGLFSVLSTSQSLTELDLSDNSLGDPGMRVLCETLQHPGCNIRRLCNQKLVELDLSDNALGDFGIRLLCVGLKHLLCNLKKLWLVSCCLTSACCQDLASVLSTSHSLTRLYVGENALGDSGVAILCEKAKNPQCNLQKLGLVNSGLTSVCCSALSSVLSTNQNLTHLYLRGNTLGDKGIKLLCEGLLHPDCKLQVLELDNCNLTSHCCWDLSTLLTSSQSLRKLSLGNNDLGDLGVMMFCEVLKQQSCLLQNLGLSEMYFNYETKSALETLQEEKPELTVVFEPSW

SEQ ID NO: 9-10 - skipped (2 entries)

SEQ ID NO: 11 - DNA, 16010 bp, Artificial Sequence
  STAT6
agagctccagggagggacctgggtagaaggagaagccggaaacagcgggctggggcagccactgcttacactgaagagggaggacgggagaggagtgtgtgtgtgtgtgtgtgtgtgtgtgtgtatgtatgtgtgtgctttatcttatttttctttttggtggtggtggtggaaggggggaggtgctagcagggccagccttgaactcgctggacagagctacagacctatggggcctggaagtgcccgctgagaaagggagaagacagcagaggggttgccgaggtgaggggttgcctccgaggtgggtgcgggggcctctatgagtgcatgggggtggattcgtggggggagctctcgggatcctcccctggctgggtggatggtccccaagagatggtttcagctagtgttggtggctggtggcactgggttttagcagtttcgaactcctggaggaatctgggagggtccaggcctcagtactcccctcccccatgggtcacgttttcacagcctcacccctgcacccccagggccatggaaagtcagggaaaggaggtgaaggagtgcccctctgccctgagtcgggggaagtggccgcccctccctggaaggttgatgccagagggcagtggatccttgttaaacccctatcctgccctccactaaaggttcctgttcaagggtgtggctggggcgtgagcaagccccagatgtagacctcatggtggcccagacgagggggaatttccccctcaaaactgctccacgcttggctgctgtagacgctgagatttcccagcggcggcgccgagttaaccctcctcgtgctgaactggctccacctccccgcctgcccccaccgccacattcacgcattgggcaactcagagaagctgttttaactttcgatcctgtggtcccacaatcagaggactcgggcagataggggttgagataagcgagtttaggccaccaagcgggcggacgaggatcccagaccttgcgcttcccttctgagtttgggaggtaacactggccccgcccctcacgccgtggctcctccctcccttccccttcaaggggctgaagacaaaaggtgcccctgtcctggtcaagccaatcgacccagccttgttatgggttggggtggggagaaatgtgtcctcctgatggctggggaagaagaggggttggatatttctagccagggccatgccaggaggctggtcactctgcaaggggatgcagaggaaagcggtgcccactcactccagaggacctttctctcttgggctagagaaaggcctattggaggaacctgagcaggaggggtaaggattctgccttgaggagaaaagagctggggtaagtgggcactggaggaaagaggggcatgaaggtcttggagcagaaacgtccagagaagggacctctccattttccatccctctgagaggcctgggagaggtgagaggctgaacgtgcaacaggaggacttggggttactgggtttggggagacctggggagttgtcatcccatcctctccctcatctctgggagagggatattatgagaaacgtgaactgagaggcccctgggaaaccactggttacccagtcctccctgaacctggaaatggggatgcaaccccctcttctacttccctgtcccctcctctcctttctacctgttttcgtctctcatctttgccttctagccctccagcttcctctctcttctaggctctttcctcctagcttactaaacccgccttttttccagtctcttccatcctcttccttagttctctctactttccttttccacctctcctccttcaagtctcctcccaccttcccccacttcttaggatgatcagatttgcccctggaagggatcctaacaacacagtgcgatggttaatccccactcagattcaaagcctgctttccaaactcacttactgagtggccttgggcagagtagagaaactccttaagcctcagtttcttcatctataaaatgggatattatatattttaaaaagtgtcgtgaggcctgaaggagataatacactgagtgtaatgcctcatacacagtaagtgcttaacaaatagtagctgttattactctcccatcctcttcatcatctagccttgtggttttcatttttattttatttcatttatttatttatttattttgaggcagagtctctctctgtcgcccaggctggagtgcagtggctcgatctctgctcactgcaagctccgccccccaggttcacgccattctgtcacctcagcctccccagtagctgggactacaggcgctcgccaccacgccctgctaattttgtttttgtatttttagtagagatggggtttcactgtgttagccaggatggtcttgatctcctgacctcgtgatctgcccgcctcggcctcccaaagcgctgggattacaggcatgagccactgcgcctggccgagccttgtggttttcaaattatctcatggagtcctagaattttgagaggtttgtctagggatgcctttggcgtcaggaggtggggagagggaagtagaagcagtcgagtttcaggctttccatgcttgctttcaacagggcatcttcggtttcgtaccttttatgtaattgagattccacagattaaaagctgacattgcctaccgctttaaaaagtttggaaagttttccactcatctaacactcatattttatagatgagaagatcgaagcccacaaagggaaggctctttgcccacagaaccagagccaggtctagagctgcaactaaatcctctgccactctaagagagctctcgctctactgccctgtctccctttgcctccccatccctctggctacagctcagctcttcccacccctgtgtctatcactgaaggagttacccccatctcaggcattgactcaggatgcccctggtttaaggtggtctggccatgagtggtggtggggacggtccctaggagggctatctatgggaggtccctggctgccccaggagataggccaagtttcttgggcacccctcagagtggccttatttttctcctccaggcaacctccaagtcccagatcatgtctctgtggggtctggtctccaagatgcccccagaaaaagtgcagcggctctatgtcgactttccccaacacctgcggcatcttctgggtgactggctggagagccagccctggtgagtcctggctgctccctgctggtcccccaagtcttccctaactcatcttccttctccttagatttttctcccctcacccatggattcagaacttgagacctgttattccatgtgtagtgacctagatttagcagggagtctgtgccccatcaagaccaggctatgaatgttgacagatggagaccccatctcttaggaggctgagccgaagaggaggggggtttgggctgggacaaaggcacttctcataacagctagaagactgggaaacaaggcgcatgggtgaaagctacagagggcctagatggagaataaggagcgagaaaggaactgctgagcttttggctgtggggtaaagggtcaggagagctgaggaagccctggcctgaggtagcctcatcctgatcttcctgcagggagttcctggtcggctccgacgccttctgctgcaacttggctagtgccctactttcagacactgtccagcaccttcaggcctcggtgggagagcagggggaggggagcaccatcttgcaacacatcagcacccttgaggtggggcaggaggggaggggacaaggctgggtggggctgaggttgaactgggttgagcattgggccctggaagaaaattggttggatgctggaagcaaattggtgttcctgtggttaactgctagctagcaggcaaattagattttaaaagcatgcaaatgcacaaaaacttctggagtctacagttgtgcttccttatagtatatgtgtgaatgcaggcctggggattggagggattgaaggacatgggtaagagcaaagctcactgtttaccaccctcatttctgtagagcatatatcagagggaccccctgaagctggtggccactttcagacaaatacttcaaggagagaaaaaagctgttatggaacaggtattgtgatattccacctcccaccccaactcaatcccctgagactttggcctgagccatgacaaactagaaagaatttgaacctcagtaaaggctcagtgttctaggcccaggaatgaccaaaggaggttcctagggtcagagtgaaccccaagtcaagctcagggaatctttctatgagggactgaaggtaagaggccggggagaacagagcaagggataaggagctgattctgctaggagcaaggtcttatctccacgatattccaaaaggtcaggaagaactgccaaaggggagaggggaacaagaaaacgctatctgcagagcagagagtggaggccaggtatagagggatgagcagagtgtttcacttcttggcatctgtccttcctgtgtagttccgccacttgccaatgcctttccactggaagcaggaagaactcaagtttaagacaggcttgcggaggctgcagcaccgagtaggggagatccaccttctccgagaagccctgcagaagggggctgaggctggccaaggtgggggccagggtggttctggggagtgtgtaggagtggttgcctcttggatctcaaccttatctgaacctctaatctgtctgcacccttgatttctgcccccaaccctcagtgtctctgcacagcttgatagaaactcctgctaatgggactgggccaagtgaggtgagtaatgggctgacaggtggagaccttggtcaaagtgcagctggagggatggaagctagacctcagaaagacacaggctgaagtagggcaagggaatgccagaggagtgagaaaaagagccgtatcccaggagctgggtgtggaggcagcgtgaggccctggctcaggcccctctctgcccataggccctggccatgctactgcaggagaccactggagagctagaggcagccaaagccctagtgctgaagaggatccagatttggaaacggcagcagcagctggcagggaatggcgcaccgtttgaggagagcctggccccactccaggagaggttgggctagggctgatggggaagagggggcaagctgggggtgggcagctgaccctgctgaaggccctacaggtgagagaaagaagccaggcgggagggccttggagtggaccaagatgcataaaagccagttccagcggggctgtgcacactgtcgttcaggtcgcatcctgtacaagtgggcctagtggaggggcacaagcggggactcatccaacccaggcttctctcctcaagccccatgcctagaggaataggagggcttttccatttggtttattgggtgggaacactttccaatttgccacaaagcactgtaagtggtggcagttgtcctgggtgcaagagccgtcgggggagaggcagctgggtttccacagggggtgtaggcactgagaatgaacctcccacccagaccctaggccaacagatcacagaacccccttcagcccaggtgccttgcagccacacccactacccaccccacttctccacacatgatagcctttctccctgggtataggggaagggggtctgggccggagcaagcagccttaatcctgtgccccctgaccactgtcctggccccaggtgtgaaagcctggtggacatttattcccagctacagcaggaggtaggggcggctggtggggagcttgagcccaagacccgggcatcgctgactggccggctggatgaagtcctgagaaccctcgtcaccaggtattccccgggagctcccagtctggcctagaacagacctcgggaagaaaagaagggggctagagctgtggggagggcaccagcagggacctagcccccaactccccttgtgtcctcctcactcccagttgcttcctggtggagaagcagcccccccaggtactgaagactcagaccaagttccaggctggagttcgattcctgttgggcttgaggttcctgggggccccagccaagcctccgctggtcagggccgacatggtgacagagaagcaggcgcgggagctgagtgtgcctcagggtcctggggctggagcgtaagctgggattggacctggggttggagaagggctgttagggtgatggaggcagcctggagggctggcactgaaaagagcaagggatggggagggagggccatgggatgtggagaccctgaatggtcaaggcagaggaaagggagggacccatttagggctggaatggggtgggggcatcatgatttggccaagatggggactcctcccttaagaacccaaacagagacatggagatttagggctggtgacagtgggtagtctacactcacccatgcactcgccacacctgacgacagtgagatgagctcgttcacactctgacctcccctggcagagaaagcactggagaaatcatcaacaacactgtgcccttggagaacagcattcctgggaactgctgctctgccctgttcaagaacctggtgaggggctttggggtgcagtgaggggggcaccactaggagactgtgggactctccttggagaggatgtcaggaagcccaggaggagcggtctctgtcctcatgacctcgcccttgctctccctcaccccacccacagcttctcaagaagatcaagcggtgtgagcggaagggcactgagtctgtcacagaggagaagtgcgctgtgctcttctctgccagcttcacacttggccccggcaaactccccatccagctccaggtgaaccgtggcccagccctgccccaatctgggaccccgagtcctcctccaatgccacacacaagggccctggaccctcacctcttgtgactgccccataccccatgtgtctgggattcatgcacactggggcccgggtgagtgggggtgagcaagagcatggagtgcacagggcagggaatggtagtggatagcagcaaacacttcggaagcacttcctatagaccagggcactctattaaatgatacatacgcacatgcgtgccagcacacacacgtctggttttcacaataacattatgaggtaggcagtattatcagcctcattttatagataaggacattgagacagagagtttaagtagtttgtcccagtcacacagctaagtgttggagctggtatttgaaacctggaggtctggttccatagcgatgactaataaccacttctctacggtgaggccctgattgagcttcagaacgcatttaataacatggcatgagctttttgattatgatgtgtgagtccaataacttctctgagtgctcagagccagtcccctgaggaaacttcttgcttcactaagaaacccctgtccggctgggcatggtggctcaagcctgtaatcccagcactttgggaggccgaggtgggtagatcacaaggtcaggagttcaagaccagcctggccaatatggtgaaaccccgtctccactaaaaatacaaaaattagctgggcgtggtggtgcaggcctgtagtcccagctgctcgggaggctaagcaggagaatcgcttgaacccaggaggcggaggttgcagtgagccaagattgcgccactgcccttcagcctgggcgacagagcaagactatgtctcaaaaacaaaacaaaacaactcagcactttgggaggccaaggtaggaggatcgcttgagcctgcaagtttaagaccagcctgggctacatagggagatccaatctctacaaaaaataaaaaattggccgggcatggtggctcacgcctgtaatcccagcactttgggaggccaaggcgggcggatcatgaggtcaggaaatcgagaccatcctggctaacacggtgaaacctcgtatctactaaaaatacaaaaaattagccaggcatggtggcgggcgcctgagtcccagctactcgggaggctgaagcaggagaatggcgtgaacctgggagggagagcttgcagtgagccaagatcgcgccactgcactccagcctgagtgacagagcgagactctgtctcaaaaataaataaataaataattagctggattaggtggtacatttctgtagttccagctattcaggaggctgaggtggaaggatcacttgagccctgaaggctgaggctgcagtgagctgagattgcactactgcactccagcctgggcaacagagtgagatactatctaaaaaaaaaaaaaaaaaaaaaaaaaaaaaaaaaaaaaaaaaaaaaaaaaggaaagaaagaaagaaaagaaacccctgtcctcaccctcttcaggccctgtctctgcccctggtggtcatcgtccatggcaaccaagacaacaatgccaaagccactatcctgtgggacaatgccttctctgagatggtgaggaaagtcctggagttggagggaacaggggcagggtgggttctaacatgggcagtggtgcaggcctgctgatggggtggtgggcatgtttaaatgggtgtgaccttaacactttctcatgggcctgctttcgtgcttctgacctcttttcaccccagtcttaacaactatcaggccacagcactgtaacctagaaaaaacagcatgtttgtgagcgatatcaggggctgtggaggggtaggccacaggcaggtgggagggatgaaggccggcccgaggaataacaagacggtagcctgcagtgctctcttcttcccccttctccccaggaccgcgtgccctttgtggtggctgagcgggtgccctgggagaagatgtgtgaaactctgaacctgaagttcatggctgaggtggggaccaaccgggggctgctcccagagcacttcctcttcctggcccagaagatcttcaatgacaacagcctcagtatggaggccttccagcaccgttctgtgtcctggtcgcagttcaacaaggtcattctcctgccctttggacctcccacccccaagctcttcatccctggggcactcagggcctgctcagcctccatgcagggaccttccactggattctccacagtgccccctcaggtcctttaggaaggcctgtcatggaccagggaggaaaaaccccaggcctgggggttggctctggagatgcgttctctgacatccctgaggttttggtctgggggccatctgtccttcctctttaccagtgacttgcatgactcacccaggttgtgtgtaaacagagctctgattcaaagtgactttgacctgttggaaaaatagttcctggccgggcacagcggctcatgcctgtaatcccagtctttgacatgccggggtgggtggatcacctgaggtcaggagtttgagaccagcctggccaacatggtgaaactccatctctactaaaaatacaaaaattagccagttgcggtggcacatgcctgtaatcccagctacatgggaggctgacgcaggagaattgcttgaacccaggaggtggaggttgcagtgagctgagatcataccactgcactcaagcctgggtgacagagcaagactctgtctcaaaaaaaaaaaaaaaaaaaggccaggcatggtggttcatgcctgtaatcccagcactttgggaggccgagacggatagatcacctgaggtcaggagttcgagaccagcctggccaacatggcaaaaccccgtctctactaaaaacaaaaaaatagccaggagtggtcgtttgcgtctgtaatcccagctactcggctgaggcaggaggtgaacccaggaggtagaggctgcagggaagatgaaaccattgcactccagcctgggcaagactctgtatcaaaaaaaaaaaaaaaaaaggctaggtgtggtggctcacacctgtaatcccagcactttgggaggctgaggcgggcggatcacaaggtcaagagatcgagaccatcctgaccaacatggtgaaaccccgtctctactaaaaatacaaaaattacctgggcatggtggcgcatgcctgtagtcccaactactcgggaggctgaggcaggagaatcacttgaacctgggaggcagaggttgcagcgagccaagattgtgccactgcactccagcctgccaacagaatgagattctgtctaaaaaaaaaaagaaagaaagaaagaaagaaaaagaattcctgttgcaaaaactgaacaaaatcccacagggacatgtgcagtaataccagctaccacgtgttgacagcttatatgccaggcgctgtgcttaacaccttatgtatgttatctcacttaatcctcccaacatctctttgaggtagatactattattatccccattttacagatgaggaatctgatgctcagagggttatgtagtttgttcaagttcccaaagcaggtgagtgccatggctaggagagaaccacatatttctgactcttgctcttttattttatgttatattatgttattttatgttttggtttttttttcttttctttctttctttctttctttctttctttctttctttctttctttctctttctttctttctttctttctttctttctttctttctttctttctttctttctttctttctctttctctttctctctttttctttcttttgtgtgagacagaatctttaaagagaagaaagaaatgctcatgtgaccagagggtgtgttagctaaagggagcaagacagtcacacccagcaggttaccttcctttgggcgtcacctctgccacacctccttagggagagggtgtagcatagtagttaagaggggctccagggccagaatgcctgggtttaaatcctagctctgcctcttaccagctatgtagacctgggcaagtcattcgacgtttttggacttccatttcttcatctgtaagatggaattattataatccctacttccatagcctggtaaagagcaaataaatatatggaaaggcttgaaatagtggctggcacgtgtaagcattaggattggtcgttgtcattgatggagtctcaggttcggtctgatcctcagccctgtgattctgtcgtgagggcactcacagctcactgcctgccctaaacaggctccagctctggccctccctcggctcacacctttccccctctccccctaggagatcctgctgggccgtggcttcaccttttggcagtggtttgatggtgtcctggacctcaccaaacgctgtctccggagctactggtctgaccggtgagtccccaccctgggtagtctgagcagccatacaccagtcacctccatactcactgcccatgccccatcctctccttcatcccggccaggctgatcattggcttcatcagcaaacagtacgttactagccttcttctcaatgagcccgacggaacctttctcctccgcttcagcgactcagagattgggggcatcaccattgcccatgtcatccggggccaggatggtgaggccaccccagccagtcctctgtctctgtgcctgtgccctctggggtttcttctgggaatgaaatgtcctgaccttcctgatgccgatcctgatcttcaggaagttcttccagcttctcttcttccttctgtggtctaaatgttcaccttctcactgtgagctctgtgggaacggagactagtgggtctctctccctcaggagccccaccctaggtcctctctcccttgccttggtggagtgagaacaggtcttatggtaggggttggggaaggggaagaaagtccggacagagggatctcagggtctccttcctaccataggctctccacagatagagaacatccagccattctctgccaaagacctgtccattcgctcactgggggaccgaatccgggatcttgctcagctcaaaaatctctatcccaagaagcccaaggatgaggctttccggagccactacaagcgtgagctggaactggcagctctgattccttcctgtcacccacttcctccctgctccccgctgccctcctctccctgcccgcgtgtcatcctgatgtcactccctatttcatagctgtgcttctcttacttccccatgatccatgcccaccttttccacctcccttcctccctaaccccagagcactccatggctgtcttttccttctcacaacagctgaacagatgggtaaggatggcaggggttatgtcccagctaccatcaagatgaccgtggaaaggtgagtgtggtggtatggacagtgggtaggtcaggggcttagtgcttatctgcaggaaggaggggtggcatcaacccttggtcagtcacatgtacctccttccctcctccagggaccaaccacttcctaccccagagctccagatgcctaccatggtgccttcttatgaccttggaatggcccctgattcctccatgagcatgcagcttggcccagatatggtgtaaggagctggaaagacaggaatgggagtggtctgtgcagatgggctaatcttagcatgggcagctgggagagctggcactgggggctgaacagggaatcttcctttccatgagagggacacctgttcaaaagcagggtgtggtggtgtccaggagaagggctggcatcagggggtctgttttctttccccaggccccaggtgtacccaccacactctcactccatccccccgtatcaaggcctctccccagaagaatcagtcaacgtgttgtcagccttccaggagtaagtgaaaaacctcatggggataccatcccactctaagggggtgggcatttgaattgttagaagaggctcttctgtgagaaaggagcagcaaatgctaacagcctgtcttcttctcttctgtccactctaatgagggggtagtagttaagatctggactgcctaggtttgaattctagctccaccacttactggtttggggcaaattacttagcctttggtgccttatctgcacaatgggggataataatgctaataataataacctacctcactgcattattgtggagattaaatgagttcataacacttaaaaagctgagcatagtgcatggctcatagcaaaagctgtgtaagtccagtcgtggatcacttaatgaaggagcattttctgtctttggcagtttcataattatgcgaataccattgagtataattacacaaacctagatggtatagactactatacactgaggctatattgtgtagcctattgatcctagctttaaacccgagcagcatgatactgttctgaatagtataaggaaatagtaacataatggtaaatatttgtgtgataggaattttcagcttgattataattttttttttttgagacagggtctcactcactggagtgcagtggtgcgatcttagctccctgcaacctccgcctcttgggctcgagcaatcctcctgctgtagtgcaccacgacactcggctaattcttttttaagatttttctgcagacaaggtctcacttactgcccaagctggtctcaaactcctgggcttaagtgatcctcccacctcggcctcccaaagcgttaggattacaggcgtgagtcactctgcctggccttgattataatcttatgggaccactgtggtctgtagttgacagaaatgtcgttaatgtggtgcatgactgttattattattttctgtcctgcccctgagagccactgtcacttctctgctgtattggtttttgtttactcatctgttttggccttgaaatggcctagacatttttcttcccgaagtatgacactcgggtgcttattaacttagtcaagacacaacatctcccttcccagaaggtgaggcgggagtgaggacttggggacttaagaactaccaaagttcagagtccaaagaaacattagaaattggctaatccacccccataacacgcacattttacagatgagaagactgagctcagagcatagaaatagcttgcccaggccatgactaagtcaggataaggagctggagcttgtttcctcactcagtggtcctgactttgcaccactctgcatttgcctagcctgccttcctctaactgtgctctccctacttccaggcctcacctgcagatgccccccagcctgggccagatgagcctgccctttgaccagcctcacccccagtgagtgacaaagcccctcctgaccccatgtgcctcttctttcctggccttgccccgctctccttatttccattgctggttcctggcaggggcctgctgccgtgccagcctcaggagcatgctgtgtccagccctgaccccctgctctgctcagatgtgaccatggtggaagacagctgcctgagccagccagtgacagcgtttcctcagggcacttggtgagtggcagcttgggagtggaggctgggtggcatctaggggagtgggcgccatgcctactccactgcttctcccatctccttgcaggattggtgaagacatattccctcctctgctgcctcccactgaacaggacctcactaagcttctcctggaggggcaaggggagtcggggggagggtccttgggggcacagcccctcctgcagccctcccactatgggcaatctgggatctcaatgtcccacatggacctaagggccaaccccagttggtgatcccagctggagggagaacccaaagagacagctcttctactacccccacagacctgctctggacacttgctcatgccctgccaagcagcagatggggagggtgccctcctatccccacctactcctgggtcaggaggaaaagactaacaggagaatgcacagtgggtggagccaatccactccttcctttctatcattcccctgcccacctccttccagcactgactggaagggaagttcaggctctgagacacaccccaacatgcctgcacctgcagcgcgcacacgcacgcacacacacatacagagctctctgagggtgatggggctgagcaggaggggggctgggtaagagcacaggttagggcatggaaggcttctccgcccattctgacccagggcctaggacggataggcaggaacatacagacacatttacactagaggccagggatagaggatattgggtctcagccctaggggaatgggaagcagctcaagggaccctgggtgggagcataggaggggtctggacatgtggttactagtacaggttttgccctgattaaaaaatctcccaaagccccaaattcctgttagccaggtggaggcttctgatacgtgtatgagactatgcaaaagtacaagggctgagattcttcgtgtatagctgtgtgaacgtgtatgtacctaggatatgttaaatgtatagctggcaccttagttgcatgaccacatagaacatgtgtctatctgcttttgcctacgtgacaacacaaatttgggagggtgagacactgcacagaagacagcagcaagtgtgctggcctctctgacatatgctaacccccaaatactctgaatttggagtctgactgtgcccaagtgggtccaagtggctgtgacatctacgtatggctccacacctccaatgctgcctgggagccagggtgagagtctgggtccaggcctggccatgtggccctccagtgtatgagagggccctgcctgctgcatcttttctgttgccccatccaccgccagcttcccttcactcccctatcccattctccctctcaaggcaggggtcatagatcctaagccataaaataaattttattccaaaataacaaaataaataatctactgtacacaatctgaaaagaaa

SEQ ID NO: 12 - protein, 847 aa, Artificial Sequence
  STAT6 Amino Acid
MSLWGLVSKMPPEKVQRLYVDFPQHLRHLLGDWLESQPWEFLVGSDAFCCNLASALLSDTVQHLQASVGEQGEGSTILQHISTLESIYQRDPLKLVATFRQILQGEKKAVMEQFRHLPMPFHWKQEELKFKTGLRRLQHRVGEIHLLREALQKGAEAGQVSLHSLIETPANGTGPSEALAMLLQETTGELEAAKALVLKRIQIWKRQQQLAGNGAPFEESLAPLQERCESLVDIYSQLQQEVGAAGGELEPKTRASLTGRLDEVLRTLVTSCFLVEKQPPQVLKTQTKFQAGVRFLLGLRFLGAPAKPPLVRADMVTEKQARELSVPQGPGAGAESTGEIINNTVPLENSIPGNCCSALFKNLLLKKIKRCERKGTESVTEEKCAVLFSASFTLGPGKLPIQLQALSLPLVVIVHGNQDNNAKATILWDNAFSEMDRVPFVVAERVPWEKMCETLNLKFMAEVGTNRGLLPEHFLFLAQKIFNDNSLSMEAFQHRSVSWSQFNKEILLGRGFTFWQWFDGVLDLTKRCLRSYWSDRLIIGFISKQYVTSLLLNEPDGTFLLRFSDSEIGGITIAHVIRGQDGSPQIENIQPFSAKDLSIRSLGDRIRDLAQLKNLYPKKPKDEAFRSHYKPEQMGKDGRGYVPATIKMTVERDQPLPTPELQMPTMVPSYDLGMAPDSSMSMQLGPDMVPQVYPPHSHSIPPYQGLSPEESVNVLSAFQEPHLQMPPSLGQMSLPFDQPHPQGLLPCQPQEHAVSSPDPLLCSDVTMVEDSCLSQPVTAFPQGTWIGEDIFPPLLPPTEQDLTKLLLEGQGESGGGSLGAQPLLQPSHYGQSGISMSHMDLRANPSW

SEQ ID NO: 13 - DNA, 3963 bp, Artificial Sequence
  STAT6
ggggcagccactgcttacactgaagagggaggacgggagaggagtgtgtgtgtgtgtgtgtgtgtgtgtgtgtatgtatgtgtgtgctttatcttatttttctttttggtggtggtggtggaaggggggaggtgctagcagggccagccttgaactcgctggacagagctacagacctatggggcctggaagtgcccgctgagaaagggagaagacagcagaggggttgccgaggcaacctccaagtcccagatcatgtctctgtggggtctggtctccaagatgcccccagaaaaagtgcagcggctctatgtcgactttccccaacacctgcggcatcttctgggtgactggctggagagccagccctgggagttcctggtcggctccgacgccttctgctgcaacttggctagtgccctactttcagacactgtccagcaccttcaggcctcggtgggagagcagggggaggggagcaccatcttgcaacacatcagcacccttgagagcatatatcagagggaccccctgaagctggtggccactttcagacaaatacttcaaggagagaaaaaagctgttatggaacagttccgccacttgccaatgcctttccactggaagcaggaagaactcaagtttaagacaggcttgcggaggctgcagcaccgagtaggggagatccaccttctccgagaagccctgcagaagggggctgaggctggccaagtgtctctgcacagcttgatagaaactcctgctaatgggactgggccaagtgaggccctggccatgctactgcaggagaccactggagagctagaggcagccaaagccctagtgctgaagaggatccagatttggaaacggcagcagcagctggcagggaatggcgcaccgtttgaggagagcctggccccactccaggagaggtgtgaaagcctggtggacatttattcccagctacagcaggaggtaggggcggctggtggggagcttgagcccaagacccgggcatcgctgactggccggctggatgaagtcctgagaaccctcgtcaccagttgcttcctggtggagaagcagcccccccaggtactgaagactcagaccaagttccaggctggagttcgattcctgttgggcttgaggttcctgggggccccagccaagcctccgctggtcagggccgacatggtgacagagaagcaggcgcgggagctgagtgtgcctcagggtcctggggctggagcagaaagcactggagaaatcatcaacaacactgtgcccttggagaacagcattcctgggaactgctgctctgccctgttcaagaacctgcttctcaagaagatcaagcggtgtgagcggaagggcactgagtctgtcacagaggagaagtgcgctgtgctcttctctgccagcttcacacttggccccggcaaactccccatccagctccaggccctgtctctgcccctggtggtcatcgtccatggcaaccaagacaacaatgccaaagccactatcctgtgggacaatgccttctctgagatggaccgcgtgccctttgtggtggctgagcgggtgccctgggagaagatgtgtgaaactctgaacctgaagttcatggctgaggtggggaccaaccgggggctgctcccagagcacttcctcttcctggcccagaagatcttcaatgacaacagcctcagtatggaggccttccagcaccgttctgtgtcctggtcgcagttcaacaaggagatcctgctgggccgtggcttcaccttttggcagtggtttgatggtgtcctggacctcaccaaacgctgtctccggagctactggtctgaccggctgatcattggcttcatcagcaaacagtacgttactagccttcttctcaatgagcccgacggaacctttctcctccgcttcagcgactcagagattgggggcatcaccattgcccatgtcatccggggccaggatggctctccacagatagagaacatccagccattctctgccaaagacctgtccattcgctcactgggggaccgaatccgggatcttgctcagctcaaaaatctctatcccaagaagcccaaggatgaggctttccggagccactacaagcctgaacagatgggtaaggatggcaggggttatgtcccagctaccatcaagatgaccgtggaaagggaccaaccacttcctaccccagagctccagatgcctaccatggtgccttcttatgaccttggaatggcccctgattcctccatgagcatgcagcttggcccagatatggtgccccaggtgtacccaccacactctcactccatccccccgtatcaaggcctctccccagaagaatcagtcaacgtgttgtcagccttccaggagcctcacctgcagatgccccccagcctgggccagatgagcctgccctttgaccagcctcacccccagggcctgctgccgtgccagcctcaggagcatgctgtgtccagccctgaccccctgctctgctcagatgtgaccatggtggaagacagctgcctgagccagccagtgacagcgtttcctcagggcacttggattggtgaagacatattccctcctctgctgcctcccactgaacaggacctcactaagcttctcctggaggggcaaggggagtcggggggagggtccttgggggcacagcccctcctgcagccctcccactatgggcaatctgggatctcaatgtcccacatggacctaagggccaaccccagttggtgatcccagctggagggagaacccaaagagacagctcttctactacccccacagacctgctctggacacttgctcatgccctgccaagcagcagatggggagggtgccctcctatccccacctactcctgggtcaggaggaaaagactaacaggagaatgcacagtgggtggagccaatccactccttcctttctatcattcccctgcccacctccttccagcactgactggaagggaagttcaggctctgagacacaccccaacatgcctgcacctgcagcgcgcacacgcacgcacacacacatacagagctctctgagggtgatggggctgagcaggaggggggctgggtaagagcacaggttagggcatggaaggcttctccgcccattctgacccagggcctaggacggataggcaggaacatacagacacatttacactagaggccagggatagaggatattgggtctcagccctaggggaatgggaagcagctcaagggaccctgggtgggagcataggaggggtctggacatgtggttactagtacaggttttgccctgattaaaaaatctcccaaagccccaaattcctgttagccaggtggaggcttctgatacgtgtatgagactatgcaaaagtacaagggctgagattcttcgtgtatagctgtgtgaacgtgtatgtacctaggatatgttaaatgtatagctggcaccttagttgcatgaccacatagaacatgtgtctatctgcttttgcctacgtgacaacacaaatttgggagggtgagacactgcacagaagacagcagcaagtgtgctggcctctctgacatatgctaacccccaaatactctgaatttggagtctgactgtgcccaagtgggtccaagtggctgtgacatctacgtatggctccacacctccaatgctgcctgggagccagggtgagagtctgggtccaggcctggccatgtggccctccagtgtatgagagggccctgcctgctgcatcttttctgttgccccatccaccgccagcttcccttcactcccctatcccattctccctctcaaggcaggggtcatagatcctaagccataaaataaattttattccaaaataacaaaataaataatctactgtacacaatctgaaaa

SEQ ID NO: 14 - protein, 673 aa, Artificial Sequence
  STAT6 Iso 2
MEQALAMLLQETTGELEAAKALVLKRIQIWKRQQQLAGNGAPFEESLAPLQERCESLVDIYSQLQQEVGAAGGELEPKTRASLTGRLDEVLRTLVTSCFLVEKQPPQVLKTQTKFQAGVRFLLGLRFLGAPAKPPLVRADMVTEKQARELSVPQGPGAGAESTGEIINNTVPLENSIPGNCCSALFKNLLLKKIKRCERKGTESVTEEKCAVLFSASFTLGPGKLPIQLQALSLPLVVIVHGNQDNNAKATILWDNAFSEMDRVPFVVAERVPWEKMCETLNLKFMAEVGTNRGLLPEHFLFLAQKIFNDNSLSMEAFQHRSVSWSQFNKEILLGRGFTFWQWFDGVLDLTKRCLRSYWSDRLIIGFISKQYVTSLLLNEPDGTFLLRFSDSEIGGITIAHVIRGQDGSPQIENIQPFSAKDLSIRSLGDRIRDLAQLKNLYPKKPKDEAFRSHYKPEQMGKDGRGYVPATIKMTVERDQPLPTPELQMPTMVPSYDLGMAPDSSMSMQLGPDMVPQVYPPHSHSIPPYQGLSPEESVNVLSAFQEPHLQMPPSLGQMSLPFDQPHPQGLLPCQPQEHAVSSPDPLLCSDVTMVEDSCLSQPVTAFPQGTWIGEDIFPPLLPPTEQDLTKLLLEGQGESGGGSLGAQPLLQPSHYGQSGISMSHMDLRANPSW

SEQ ID NO: 15 - protein, 737 aa, Artificial Sequence
  STAT6 Iso 3
MEQFRHLPMPFHWKQEELKFKTGLRRLQHRVGEIHLLREALQKGAEAGQVSLHSLIETPANGTGPSEALAMLLQETTGELEAAKALVLKRIQIWKRQQQLAGNGAPFEESLAPLQERCESLVDIYSQLQQEVGAAGGELEPKTRASLTGRLDEVLRTLVTSCFLVEKQPPQVLKTQTKFQAGVRFLLGLRFLGAPAKPPLVRADMVTEKQARELSVPQGPGAGAESTGEIINNTVPLENSIPGNCCSALFKNLLLKKIKRCERKGTESVTEEKCAVLFSASFTLGPGKLPIQLQALSLPLVVIVHGNQDNNAKATILWDNAFSEMDRVPFVVAERVPWEKMCETLNLKFMAEVGTNRGLLPEHFLFLAQKIFNDNSLSMEAFQHRSVSWSQFNKEILLGRGFTFWQWFDGVLDLTKRCLRSYWSDRLIIGFISKQYVTSLLLNEPDGTFLLRFSDSEIGGITIAHVIRGQDGSPQIENIQPFSAKDLSIRSLGDRIRDLAQLKNLYPKKPKDEAFRSHYKPEQMGKDGRGYVPATIKMTVERDQPLPTPELQMPTMVPSYDLGMAPDSSMSMQLGPDMVPQVYPPHSHSIPPYQGLSPEESVNVLSAFQEPHLQMPPSLGQMSLPFDQPHPQGLLPCQPQEHAVSSPDPLLCSDVTMVEDSCLSQPVTAFPQGTWIGEDIFPPLLPPTEQDLTKLLLEGQGESGGGSLGAQPLLQPSHYGQSGISMSHMDLRANPSW

SEQ ID NO: 16-20 - skipped (5 entries)

SEQ ID NO: 21 - DNA, 2108 bp, Artificial Sequence
  CEBPb
ttactgcccccaaaaggctttgtaaccattctcaaaaaaaagtttattaaaagtgttcttaatgcttgaaacggaaaagattcccaaaatatacagacgcctcttttctcatagaaatagattattttttataatacaaaaaaagaccaaaaaacaaaacaaaacaaaacatcaacagcaacaagcccgtaggaacatctttaagcgattactcagggcccggctgacagttacacgtgggttgcgtcagtcccgtgtacacacgcgttcagccatgtttaaaccgattgcatcaacttcgaaaccggcccgcccgccggcgcctggagaggggcagagggagaagcagagagtttatcattcatctgtacacatagacgtttcttctttaaataacaccacgggcgggagccccatctgcatgtgcggttggtttggacaaaaatatagatatatatatataataaaatattaaaattaccgacgggctccccgcgctgccaagtgccccagtgccaaagttttgccggcgccgccgggggcgggggcgagggcgcgggcgcgggcgctccccggagtctcagccccggccggcagggggacgcgcgcgggggccgcgctagcagtggccggaggaggcgagcaggggctcgggcagctgcttgaacaagttccgcagggtgctgagctcgcgcgacagctgctccaccttcttctgcagccgctcgttctcggccgtgagctccaggaccttgtgctgcgtctccaggttgcgcatcttggccttgtcgcggctcttgcgcacggcgatgttgttgcgctcgcgccggatcttgtactcgtcgctgtgcttgtccacggtcttcttggccttgctcttgacctgcgagggcgccggcgcggcccccgcgtagcaggcggtcgggggcgccttggcgtcagcggggctcggcgtgccgggcgggctggacgaggaggacgtggagaggctcccgctgctgccgctcggcaccgcctggtagccgaggtaagcgcgcagcgcgtacgggaagcccgccgccatgcctgcgccgccgcccggcgccccggcctcctccttccgcttgcagtccgcgggctcgaagcccggctccgccttgagctcggcgggcggcggcggcggcgggggcggtgggtgcaggggcgcgaagcagccggggtgcagcgcgcccttggcggcccccaggcgccccaggctcacgtagccgtactcggccggcttcttgcagttcttgcccccgtagtcgtcggagaagaggtcggagaggaagtcgtggtgctgcccggaggaggcgggcgcgggggcgggcgcgggcggagccgcctcgaaggtgtccgtggccgtggcgggcgccggggcctgcggcgcgcccagcggctccaggtacgggctgaagtcgatggcgcgctcgtggtcgccgatgctgcccagctcgccggcgggggggcgcggcccgggtctggccgcggggggcgccgcgggggccgccttgccgccgtacgcagcagccaagcagtccgcctcgtagtagaagttggccacttccatggatttaaaggcaggcggcggcggcggcagggggagacatgctgggtcccaggccaccaggcgttgcatgaacgcgggtgcccggggagggggcctggggctgcccgctccggccggcccgcaggtggcgcggcctccctgctctgagctgtcgccgctgcgtcgctgctgctgctgccgccgctgccggggtggccgctattagtgagggggctggtggctggaccctcgggtgggtccccttcccagtcccgtgcgcggctctgactcgctaaagtttctcctgagcccggttatttataagggcggcccgtagcaaccgctgcgtcacgccggcccctcccgccgcgccgccgggacgcgaaggacacggccgcggccgcccgagacccccgggaggacggcggcagggcgcagcggagggaccgggcacccggagcgcgttttcggggggcccccgggacgcaggggcggcctcacgccccctgcccacccccgcccggccgccccgggattggga

SEQ ID NO: 22 - protein, 345 aa, Artificial Sequence
  CEBPn Amino Acid
MQRLVAWDPACLPLPPPPPAFKSMEVANFYYEADCLAAAYGGKAAPAAPPAARPGPRPPAGELGSIGDHERAIDFSPYLEPLGAPQAPAPATATDTFEAAPPAPAPAPASSGQHHDFLSDLFSDDYGGKNCKKPAEYGYVSLGRLGAAKGALHPGCFAPLHPPPPPPPPPAELKAEPGFEPADCKRKEEAGAPGGGAGMAAGFPYALRAYLGYQAVPSGSSGSLSTSSSSSPPGTPSPADAKAPPTACYAGAAPAPSQVKSKAKKTVDKHSDEYKIRRERNNIAVRKSRDKAKMRNLETQHKVLELTAENERLQKKVEQLSRELSTLRNLFKQLPEPLLASSGHC

SEQ ID NO: 23 - DNA, 2113 bp, Artificial Sequence
  CEBP NM_005194.3
tcccaatcccggggcggccgggcgggggtgggcagggggcgtgaggccgcccctgcgtcccgggggccccccgaaaacgcgctccgggtgcccggtccctccgctgcgccctgccgccgtcctcccgggggtctcgggcggccgcggccgtgtccttcgcgtcccggcggcgcggcgggaggggccggcgtgacgcagcggttgctacgggccgcccttataaataaccgggctcaggagaaactttagcgagtcagagccgcgcacgggactgggaaggggacccacccgagggtccagccaccagccccctcactaatagcggccaccccggcagcggcggcagcagcagcagcgacgcagcggcgacagctcagagcagggaggccgcgccacctgcgggccggccggagcgggcagccccaggccccctccccgggcacccgcgttcatgcaacgcctggtggcctgggacccagcatgtctccccctgccgccgccgccgcctgcctttaaatccatggaagtggccaacttctactacgaggcggactgcttggctgctgcgtacggcggcaaggcggcccccgcggcgccccccgcggccagacccgggccgcgcccccccgccggcgagctgggcagcatcggcgaccacgagcgcgccatcgacttcagcccgtacctggagccgctgggcgcgccgcaggccccggcgcccgccacggccacggacaccttcgaggcggctccgcccgcgcccgcccccgcgcccgcctcctccgggcagcaccacgacttcctctccgacctcttctccgacgactacgggggcaagaactgcaagaagccggccgagtacggctacgtgagcctggggcgcctgggggccgccaagggcgcgctgcaccccggctgcttcgcgcccctgcacccaccgcccccgccgccgccgccgcccgccgagctcaaggcggagccgggcttcgagcccgcggactgcaagcggaaggaggaggccggggcgccgggcggcggcgcaggcatggcggcgggcttcccgtacgcgctgcgcgcttacctcggctaccaggcggtgccgagcggcagcagcgggagcctctccacgtcctcctcgtccagcccgcccggcacgccgagccccgctgacgccaaggcgcccccgaccgcctgctacgcgggggccgcgccggcgccctcgcaggtcaagagcaaggccaagaagaccgtggacaagcacagcgacgagtacaagatccggcgcgagcgcaacaacatcgccgtgcgcaagagccgcgacaaggccaagatgcgcaacctggagacgcagcacaaggtcctggagctcacggccgagaacgagcggctgcagaagaaggtggagcagctgtcgcgcgagctcagcaccctgcggaacttgttcaagcagctgcccgagcccctgctcgcctcctccggccactgctagcgcggcccccgcgcgcgtccccctgccggccggggctgagactccggggagcgcccgcgcccgcgccctcgcccccgcccccggcggcgccggcaaaactttggcactggggcacttggcagcgcggggagcccgtcggtaattttaatattttattatatatatatatctatatttttgtccaaaccaaccgcacatgcagatggggctcccgcccgtggtgttatttaaagaagaaacgtctatgtgtacagatgaatgataaactctctgcttctccctctgcccctctccaggcgccggcgggcgggccggtttcgaagttgatgcaatcggtttaaacatggctgaacgcgtgtgtacacgggactgacgcaacccacgtgtaactgtcagccgggccctgagtaatcgcttaaagatgttcctacgggcttgttgctgttgatgttttgttttgttttgttttttggtctttttttgtattataaaaaataatctatttctatgagaaaagaggcgtctgtatattttgggaatcttttccgtttcaagcattaagaacacttttaataaacttttttttgagaatggttacaaagccttttgggggcagtaaaaaaa

SEQ ID NO: 24 - protein, 322 aa, Artificial Sequence
  CEBPb Iso 2
MEVANFYYEADCLAAAYGGKAAPAAPPAARPGPRPPAGELGSIGDHERAIDFSPYLEPLGAPQAPAPATATDTFEAAPPAPAPAPASSGQHHDFLSDLFSDDYGGKNCKKPAEYGYVSLGRLGAAKGALHPGCFAPLHPPPPPPPPPAELKAEPGFEPADCKRKEEAGAPGGGAGMAAGFPYALRAYLGYQAVPSGSSGSLSTSSSSSPPGTPSPADAKAPPTACYAGAAPAPSQVKSKAKKTVDKHSDEYKIRRERNNIAVRKSRDKAKMRNLETQHKVLELTAENERLQKKVEQLSRELSTLRNLFKQLPEPLLASSGHC

SEQ ID NO: 25 - protein, 147 aa, Artificial Sequence
  CEBPb Iso 3
MAAGFPYALRAYLGYQAVPSGSSGSLSTSSSSSPPGTPSPADAKAPPTACYAGAAPAPSQVKSKAKKTVDKHSDEYKIRRERNNIAVRKSRDKAKMRNLETQHKVLELTAENERLQKKVEQLSRELSTLRNLFKQLPEPLLASSGHC

SEQ ID NO: 26-30 - skipped (5 entries)

SEQ ID NO: 31 - DNA, 32738 bp, Artificial Sequence
  KRAS G12D genomic sequence
gattttcctaggcggcggccgcggcggcggaggcagcagcggcggcggcagtggcggcggcgaaggtggcggcggctcggccagtactcccggcccccgccatttcggactgggagcgagcgcggcgcaggcactgaaggcggcggcggggccagaggctcagcggctcccaggtgcgggagagaggtacggagcggaccacccctcctgggcccctgcccgggtcccgaccctctttgccggcgccgggcggggccggcggcgagtgaatgaattaggggtccccggaggggcgggtggggggcgcgggcgcggggtcggggcgggctgggtgagaggggtctgcaggggggaggcgcgcggacgcggcggcgcggggagtgaggaatgggcggtgcggggctgaggagggtgaggctggaggcggtcgccgctggtgctgcttcctggacggggaaccccttccttcctcctccccgagagccgcggctggaggcttctggggagaaactcgggccgggccggctgcccctcggagcggtggggtgcggtggaggttactcccgcggcgccccggcctcccctccccctctccccgctcccgcacctcttgcctccctttccagcactcggctgcctcggtccagccttccctgctgcatttggcatctctaggacgaaggtataaacttctccctcgagcgcaggctggacggatagtggtccttttccgtgtgtaggggatgtgtgagtaagaggggaggtcacgttttggaagagcataggaaagtgcttagagaccactgtttgaggttattgtgtttggaaaaaaatgcatctgcctccgagttcctgaatgctcccctcccccatgtatgggctgtgacattgctgtggccacaaaggaggaggtggaggtagagatggtggaagaacaggtggccaacaccctacacgtagagcctgtgacctacagtgaaaaggaaaaagttaatcccagatggtctgttttgcttggtcaagttaaacccgaagaaaacccgcagagcagaagcaaggctttttccttgctagttgagtgtagacagcaatagcaaaaatagtacttgaagtttaatttacctgttcttgtcctttcccctatttcttatgtattaccctcatcccctcgtctcttttatactaccctcattttgcagatgtgttctacatctcaagagttattacagtactccaaaacagcacttacatgattttttaaacttacagaggaattgtagcaatccaccagctaaccgcctgaaatagacttaaacatgtgcatctcctttttttttttttttttgagacacagtctcgctctgttgcccaggctggagtgcaatggcgcggtatcggctcactgaaacctccgcctcctgggttcaagcaattctcctgcctcagcctcccgagtagctgggactagtaggtgcacgccaccatgcccagctaatttttgtatttttagtagagacagagtttcatcatgttggtcaggatggtctccatctgctctgttgcccaggctggagtgcagtggcgccgtctcggctcactgcaacctctgcctcctgcattcaagcaattctcctgcctcagcctcccgaataactgggattacaggtgtctgctgccatgcccggctaattttttgtatttttagtagagacgggggtttcaccatgttggtcaggctggtctagaactcctgacctcgtgatctgcccgcctcggcctcccacagtggcatgtgcatcttatagctgaagtctaagccttcttaaatcttgagatccatcaaaacagacaggttttctaattgttatacaatgtatatgttatgtttataatagaaatcattttacaaataagttataaatgggaaaggtctatttgtaattatcagctcagaattaaccataaaactggtgtcactgaagtgactgaggtccaaaatgctgactctgcatgttatagactacagatatcaaatatggttgctaacaatagtttactttgagactgtagccatccacagtatatttgcttttaagagatggtagatggtaattcagttttatgaaaaataaaaatgaattttcttccattacaaaattgttggattcgagtccagtccactccttactagcttttctaactctcggtgagggatcccctcccagcccatgatcttcatttggtaagactcctttggaacccagttctctctagtggatttaaatgtgatttggttttaaaaatctcattcaaggaattttttttttttctggaaacaaccaccgcataaacaagtaaaccggaagatacatgtggctctgaattcatatatatacacaaactctaatccaatgtctgtccacagtatttcctaggctagtaaactttttggccttaacgacccctctaccctctttgtttttttgagagagagagtctcactctgtcacccaggccggaatgcagtggcgcgatctcggcccgctactacctccgactctcaggctcaagcgattctcccgcctcagcttcccgagtagccgggattacaggctcccgccaccgggctaattgtatttttagatacgggatttcaccatgttggccaggctggtctcgacctcctgacctcaggtgatccgcccgcctaagcctcccaaagtgctgggattacaggccaccacacccggcctacactcttaaaaattatcgaaggggccgggcacattggctcttatctgtaatcccagcactttgggagactgaggcgggaggatcgcttgaggccaggagttggagaccagcgtactcaacatagtgagaccttgttataaagaaaaaaaaaatccaggattaaaaaaaatctttgatttgtttgggatttattaatatttaccgtattggaaattaaaacaattttttaaaatgtattcatttaaaaataataagcccattacttggtaacatgaataaaatattttatgaaaaataactattttccaaaacaaaaccaaaacttagaaaagtggtattgtttcacacttcagtaaatctctttaatgatgtggcttaatagaagatatggattcttatatctgcatctgcattcaatctattatgatcacacatctggaaaacttgtgaaagaatgggagttaaaagggtaaaggacatcttaatgttattatgaaaacagttttgacctcttgcacaccagaaaagtcttagtaacctgaggggttcctagaccacattttgagaactgttttaggctatgcaaactggttggggggaggttggggtaggcagagagctagaagatacattttagtgtaattctcctcatctattcctaattgctttggcctacatttgaaataaagcgtggaggcaaacgggataagatacatgtttgtagtggttgttaacttcaccctagacaagcagccaataagtctaggtagagcagagtaaggcggggaactatgccgtgaccgtgtgtgatacaatttttctagcctgtggtgctttttgcggcagggcttaggagtaaggttagtatgttatcatttgggaaaccaaattattattttgggtcttcagtcaattatgatgctgtgtatatttagtgtttatctacaatatatgcacattcattaatttggagctactcatcctataataaatagttgtgcatttactcccatttttttctgcatttctctccttatttataattatgtgttacatgagggaaaggaggtgaaattaaacattcatattatttcaaaaaatttgaaacaactaactaaaaaatatgttttattttctgtatggtgtttgttatacaatctgtcaatattcatgcacctcttgggagacagtgtatgaaaagcaaagagtaacagtcacatggattactgattactgagatatattcacttgcatctttttttttttttgagacggagtggctctgtcgcccaggctggagtgcagtggcgtgatctcggctcactgcaagctccgcctcctgggttcacgccattcttctgcctcagcctcccaagtagctgggactacaggcgcccgccaccacgcccggctaatttttttatatttttagtagagacggggtttcaccgggttagccaggatggtcttgatctcctgacctcgtgatccaccctcctcggcctcccaaagtgctaggattataggcgtgagccaccgtgcccggctcacttgcatctcttaacagctgttttcttactaaaaacagtgtttatctctaatctttttgtttgtttgtttgttttgagatggagtcttactccgtcacccaatctggagtgcagtggcgtgatctgggctcactgcaacctctgcctcccgggttcaagtgattctccttcctcagcctccccagtagctaggactacaggagagcgccaccacgcctgattaatttttgtatttttagtagagagagggtttcaccatattggccaggctggtcttgaactcctggcctcaggtgatccacccgccttggcctctgaaagtgctgggattacaggcatgagccgccgcacccggctttctaatctttatctttttttgtgcagcggtgatacaggattatgtattgtactgaacagttaattcggagttctcttggtttttagctttattttccccagagatttttttttttttttttttttttgagacggagtcttgctctatcgccaggctggagtgcagtggcgccatctcggctcattgcaacctcggactcctattttccccagagatatttcacacattaaaatgtcgtcaaatattgttcttctttgcctcagtgtttaaatttttatttccccatgacacaatccagctttatttgacactcattctctcaactctcatctgattcttactgttaatatttatccaagagaactactgccatgatgctttaaaagtttttctgtagctgttgcatattgacttctaacacttagaggtgggggtccactaggaaaactgtaacaataagagtggagatagctgtcagcaacttttgtgagggtgtgctacagggtgtagagcactgtgaagtctctacatgagtgaagtcatgatatgatcctttgagagcctttagccgccgcagaacagcagtctggctatttagatagaacaacttgattttaagataaaagaactgtctatgtagcatttatgcatttttcttaagcgtcgatggaggagtttgtaaatgaagtacagttcattacgatacacgtctgcagtcaactggaattttcatgattgaattttgtaaggtattttgaaataatttttcatataaaggtgagtttgtattaaaaggtactggtggagtatttgatagtgtattaaccttatgtgtgacatgttctaatatagtcacattttcattatttttattataaggcctgctgaaaatgactgaatataaacttgtggtagttggagctgatggcgtaggcaagagtgccttgacgatacagctaattcagaatcattttgtggacgaatatgatccaacaatagaggtaaatcttgttttaatatgcatattactggtgcaggaccattctttgatacagataaaggtttctctgaccattttcatgagtacttattacaagataattatgctgaaagttaagttatctgaaatgtaccttgggtttcaagttatatgtaaccattaatatgggaactttactttccttgggagtatgtcagggtccatgatgttcactctctgtgcattttgattggaagtgtatttcagagtttcgtgagagggtagaaatttgtatcctatctggacctaaaagacaatctttttattgtaacttttatttttatgggtttcttggtattgtgacatcatatgtaaaggttagatttaattgtactagtgaaatataattgtttgatggttgatttttttaaacttcatcagcagtattttcctatcttcttctcaacattagagaacctacaactaccggataaattttacaaaatgaattatttgcctaaggtgtggtttatataaaggtactattaccaactttacctttgctttgttgtcatttttaaatttactcaaggaaatactaggatttaaaaaaaaattccttgagtaaatttaaattgttatcatgtttttgaggattattttcagatttttttagtttaatgaaaatttaccaaagtaaagaccagcagcagaatgataagtaaagacctgtaagacaccttgaaggtcatggagtagaacttccatcccaagcagatgaggatttatttaatctcaaagacctccaggaggggacattccccaactgtccttgttaactcattttcagaacatatttattagcatattttacatgtaatttggatcttcatgttaaatttaacatcagtggagatggaaaataagcatatcgccttgtctttgaaatagccctatattgttagattgtttcttaggcttctttaccctgggttaagcagtcctaatactttagcatttattctacatctagtgtactaatttaaaaaaatcagttctgaaaaatttctaagaactttcttcaagttccaagctgtgaaatctagaacaggtcaaagtgccttattaacgtactgtactgtgtagtgtcttgaagagacactttgcgctgaggcaagttctgagggcattgggtggccttgggaagatatttatgcagtttagaacctggagaattgattagataactaatcataaggaaacgtcacatatttttggtactataaaaaagtggagaaataatgcctatttgcaaagatttgatttaaacatagaaacaactttatttggcttccaattttaagaatttacagcagtaaaggggaacagtctaattgaagtagactgcctatgcaatagtctctgtatatttacttttgacaagttaattcaatgtgtactatagttttgtttctttgaagaggtttgaatagtgcacccattttaatctgtattgcaaattcagggttacttggcagactctactatttaaatcagatgtaaaaggaagttttaatataattcactttatgcctgaaagttttcctgggattttggaaggtgattttactggaaatgctgtctgtcttccctgaaaatctgagaaattccattacactttgtttccaatcagaggtcatgagtgctatatgagtatatacagcatgacgtcatgaatgtgataaagtgggttaggaaaccttttgctaatgattgttaaaatgcaatataaatgttgaagaaataaagctaacagttaagcctttatttgggcggaaggctgaaaaagtttataaacttaaacctataactctgcttatgatttctgccaaaccagaagacttgactctgggaagcattggttacctgtgaactttgaaactgacggtccctgacgtagtttagtcacctgggaaaaggtatctgagattatctcttatctcccaagttacagtgagtctctgagggaactgacacattacattaagttcttggtgtagttaaactgtaagaaaggcaggagaacttagtagttaaatagttggttaaatggaaatgctgactccatgttattgtaaaaagttaaaaatttaggaggatatggggatttcactgccattgcaggttttgattggtatttaccaatccgtgtgggtcagagagaaaattagaaaggatatgactgcacattttggaattattagcagtttttctacatttaaaatggaaataaattttttaaaaatttaaatcaagtaatactgtattttttggtgatttagatttttcaaaatttacactaagagatagtaaggagggtggctattgtttctttcaataatgtctctgagaggttgtaactcatctaaggatacgtagctaataagtggtaggatttcaatttaaattctctgagaccaagttaagtagaatttgcactgtactcttgtataactttttaaaactgaaaattagctatctttcaaattaagaaaatatttactaatggagactaattcagatttgtaagtataccaaaatttgaacttagcctgctatctaatggcaacttagtggcagaggtatgatgtaaaatcattcaggtatgacacatagatggagtatgtttgtattcgaggctgtgcacataatcacctttacttgtattgtgaagtatatattgttatcttttatgaagcccactaaagagataatgaaatacctcgttattagggcaagattattgaaaactcaaaatagcccccaaacacaatacttggctagaaatatatacctttatagttcagagatcatttattatcaaaaccctgaagttttttttctaaggtaaaatttggtggaagaggaaaagtctcgttttaaaaaaatgtaggtagttacagagatcagaatgattagttgatcacttaccaaatatatattaagtatctactgtatataatatgctagtaagaataaatatagcaggaagtattttttcccaggctctaattgtttgacatcagcatgcttttattgtggcacttataattcagttcaagtattatgcccctctttgatggaacagtttcctattcagtaaggaagaccagattaatcattggattggtttgtttcatctttagtgttctgagctgtagagtatttatttaccaaggtttattttaatttttattttatttttatttttccatgttcattgtagaattcattttacctacgaatgaagtatgtagattatagagagaaaatttgtaaaattaaactgatactgaagactggtataagaaaagccttatgtaatttgtaagctgctattcttctgagtttatacatatatctttagtaatcaatgagggatggttgggtgactgccctccaggggacatttggcaacatctggagatgtttttggttgccacaacttggggagagagtactgctactggcatctattgagtagatgctattactttaaatggcaaagctgcagttacctttgcaccaacctaatattaaacttcctgcagtgcacgggaaagcccccacaacagggttatctgaccccaaacctcaatggtgttaagatccaaaccttgatatgttaacctgtagctttaaacatcctttaaattgtcaaattcatgtccctgacataaggtttatgttagattttcaagtataacaaagatttaaactttaacttttgtacgttaatgatatgttagcttactccagtcttctattaaaacattctgtttttaaaatcagagacacacagcaattttataaatcatttctcttcaaggctgtgaagctctccccacttttgtgagtgccctctactggtcaaattatttgctttataacaagtaacagtgaaatcctaagtttgtgtagtttcgctgtttaaattatgggtggcatcaatttataaatatattcgttttatttaaaagtcttatatgattgatttcgtatcatttttgctctctgctaatattaatataaagattactgtctgtattagttaggcctaactaagtaggtgagtatagtgaactaagaaaggaaacgaggcagtatataagaaaatagggtggttcagttgttaacacttactgagcttactttgttgaagggactaaaaggcagcagtgtggctctctgagcttctttgcatgcactcaggagctgcttaatggagtccaaggcttggtggtgtgttacaggggatgataggagggtcctattcagaagtggcaaattgtgaaagtgcacattttgtagagttttataggactgtagaatagttgtgagcacctgatttttagaataaacagaaaactcaggtactgtatttaggtcaaattaagaataagtatttattaagacctgaatataaaactttactggtcatggtttttttctaccttgggtttttataaatccaaagatttaaaaacatacaaatggaagttggtaatggaattaagtgaaaggaaaaaatgattttatggtttggaatctcctaagattctggttttaacaatacaactaattccttaatcctagaaatgttcttcactgcccactttgtaccatgcagtcttcctgtgggctagagatacactgaggcgcaaaacagaccagattcctgccttcatggagcttattagttttaggtatctctagatttcttgtaatacctattacaatgcctgcacatcagttcattcatgtgggttcaacgtagtactcagtacatggcaaattcaagttttacttttcggaacttcatggatttttttcctcagaatatcttttatccataattggttgaatctgtagatgcagtacccatggatatggatggcccactttattttgaagagcagtgtttctaggcaatcatgctaattatatatgacttaatttagaggctttatacttaagagcattacatttctggcgtctcttaaccattattatttcataatgtgtaggttatggaacagttaaattattgggatcttaatatagaaattagtagaaataagccagatatggtggctcatgcctgtaatcttagcactttgggaggctgaggctattcgctgtactattttttactacttttctataggtttgaaattttttcaaaataaaacattgaaaaaagtaaggtaggtagtgtgtccctccttaatcctttcaaatattttattttcactatttctattaatttttttttttgtttttgagatggagtctcgctctgttgcccaggctggagtgcagtggcgcgatcttggctcactgcagcctccacctcctgggttccagccattctcctgcctcagcctcctgggtagctggtattacaggcatgcaccaccacacccaattactttttgtatttttagtagagacggggtttcaccatgttggccaggctagtctcgaactcctgacctcgtgatctgcccgcctcagcagtgtcactgcttctagaccgttttcaaggcacagagcttagaaatgcatgttactaagaaatcaagagttaactatttttcaccttctttctcccgcagtgagaaccctggttctaccctgtttctccttgtgtaaattttaatgctaaactatacacttgtgaaataaaaatgataatgtcattcttaaattatggatcttgcagtgttatctaagtaacatagattgagtgatttaactttaggtttccttatttgtggaatttggataaatatttttcacccttgagaaaagtgagactcctttctcatcatcagagtatccttaaaccattaaggcaaacatttgggaaaaaactgagctatctggctgcataaaaattaagttttctttaacaaagatagaagacaaatgaaaacctagaaaaaccatttggttcaagtaacaggaagctatcttatatatgaattagagaaaagcaaacacacaaatagaaaaaaagggatggggggtactaaagatataaatagcttgtctaccaaaaaagaaataaaataaataacatgaacatataaaaagacacttacttcatgaatgtgatgcaagttcaaacaataaataacatttctgtactttcatattggctaaggttaaaatgataactgctaggaagggtatggagaagtgtgcgccttgcactgtagtgggagtatagaccctcagactttatggaggtcagtctggaaatatgtttcaaaatgtaaactacatgtcctttgaccaggtaattcaacttcttgaaatttatccaaggatttaattggataaatgtttaagatgtatatataagaatgtttactgcagtgttgtttatgattttaaaaaaatggaaatcatcttcatgtctaccaatagagaatgggtgaataaattatggtatgtccatatatacaaattacatagttgttggaaatattaggtagatttagatatactgatgttcaaaaatgtccattatgtaagtgaagctgggtcacagcaccttgtgttgagtatgatttcatctagaaacaaaattactccctcatcctttgttgtgttttagttttttaaaataagcttataccattgggctgggggaaaagtaaatactcgttttggagagagaaaagggcactaaagtttcagataccgttagattatttcatgcttatttttcaagcctcaataaattacataattcacatgtagtcttggattaaggaaattgctattaaggctaaataaataatatgagaggtatataatataaaatatgaacattatattggcattaagattggatccacggtcattccagcctctcattcttacctggacttcaagtgatcacttgtgggcaaatgccatctgacttgaacaggttacacatgtatgctcattatatcgttattttcaaaatttgtcatataaattttccttgagttcattcagatttttgaactagttttttctcttgggagtagtacacacttaattctctctagtactaagctaatgttcaccattcttataattttaagtatccagcatttagtaaagaagtctttgttttctttatccttacttttagtgaatgtcttagtttttaattgaaaattctgccatgaaaataagctctttaacatcttcactccctaatcaaaacagaaatccttcatagccttcagttgtagctatccttccctgtgatttgtccagctccattatatttattttgaaatatggtgaccagttttgcaaaattatttcaactgtaggtgcccagtgattttgtaaggagaagatactgtttctgaacagttctcagtagccagtggcctgcccctactttttggcctgcgtgtagtatataaaataatgcagttaactttttatagcacttttcattttataaagagattttcatggtctttaatattaatctatgtataaagtcctgtatgcagttttacctactttcacagctgaaggaacaatagcttagagaagatgtgagataaagtagtttgcccaagcccatagcacaaataagtgaagttcttcggctgtccatggatcgaagactcccaagtctatctctagcctggacttctgtcctgagcaccagacatgtatgtatatcaagatgcctgcaggtcatatccaccaggacaacccatgagtacagggaattcaacatgcccaatatcactcatcttttccttcgccctcccctttgtactcatcccctgtcggtaagctctgttattttaaaaaattgaaatgtattcacatagcatacaatttacacttttcaagtgtacatggtttttagtatattcacaagggttgtgcagtcattactactaattccagaatgttattatcaccccaaaagtcccacatccattagcagccactccccaatcccttctcccaccagcctctaaaaactgctaatttttccatctctgtggatttgtccactctgattatttcatataaagagaatcgtacagacgtggccttttgtgtctggcatcctccacacaggatgatattttcagagttcgtctatgtttttgcttgttgatcattccttcattcctttttctggctgaataatactctgttatatggatataccttattttgtttatctgttcatttgatgggcatttgagtgatttcctctttttggcaattttgaataatgccactataaacatttatgtacacgtttttgtgtgaccatatgttttcacttctctcgggtgtatatctaaggtacagttgctgggttatatggtagctctgtctttgactttttgaggaactgccaagtggttttggtagtgattgtactgtttacattcctaccaacaattttacctaagtatttctcaaatctatttaatcttttcggtccatactgctgttgctgccttagttcagattttgtcatttcttgtaataattcgtagctcatctcccagtctctgctcccctctctccctccctcccccttcttctctctcttatttccacccatttttaacatttatagaagtcaaaagtctagttcagaaagcagaaaccatactagatatttcagcacagagaactaattaggtgttggaagactgaaaggcaaaaaaacactgaagtaacacagtaacatcaagaatgggcactactcctaagattcagggaatgctgggaagatttggggtttatcagaactggaagctcagaggaggggccccttgtcgctgaggcttaatccctgcagaggtgcctttggctgctactggtgaatctgagtgggtatgatgagtcagtgtctgggaagggccaaaacattttgtccctttctataatttgtcatgataatgctagtaatgaatctgatctcccttcctattttaaaaaccttttagtgattttgtataggatgaagtttaaaactccttacttaatatacacatgaccctccgtaagctggcccctgcttgattgtccagtttcacttcttggtgcttattctaaggcctctaagccttagagatcctctaagcctttgagatccccaaaccctggactgcggactggtacccacctgtgtggcctgtgaggaactgggctgcacagccggaaggaggtgagcattacttgccttagctcctgtcagatcggcagcattagattctaataggagcgtgaaccgtgttgtgaactgcccatgcaaggatctaggttgcatactccttaggagaatctaactaatgcttgatggtctgaggtgaaacagtttcatcctgaaatcacccccaactcggtccttggaaaaattgtcttccacgaaactggtccctgatgccggaaaagttggggaccgctgttctaagctaaagttatatggagctccttggttctgtgtcctcaacatgctgttctatgttttttacattctgtttgctccttcctgcttggaatgtccttcccctccccgtctttcttaatgcatacaaagttgatctctcctgtgtgccaccattgtacttcgtcttgcatatggtgttacattcattttattttaattatttatttacgttcatgtctcttccactcaccttagttgcttgaggtcagaaactatataatgtgtgacacggaatgtgacacctagattttcaataagtgtttctatgatacaagggagactgatgtgggtagatgggaatgaactcatcaacctctgtttacataccctaaattccctgtttcttccctattataattctgacagtctacaaccgtctttgatggcttataaacggaaagtgcggaacacatcattctacagtgaatttaaataacctttcggaagagtaacgtaaagtacttgagcattaattgagtaaaagtttctcatcttttcctacaggtgttattaagcagtatgtaaaaagtccttacaatacttaatacattaagaaaacatacaatttcaagaggaaatccccgagtaatacattattgacattttcagcagttctagttatattgagaagagcatctcatggaattggcagaatgaagatggagattaaatgagatgatgtttgtaatatgcttatgacagtatctggcatataagtaagggctcagtaaatgttgactgctgtaattactattaatagtaatatgattacctttagtaaaagttattagtttctttaggttttttgtttactacaatatagtaaacaaaatctatacttggaatgtatatattgttttgttttgatacatggaatatgtctctgtgtcagagtcactgcctgagttggaaaacccatactcgagtatgttaaaaggtgaacacactgaataatttagttattaattataatggaaaaatgacaaacttgatgttctggttaatgaggttatcttatcttgaatgagttagcttttaaattcctcaaaataaaggcatttaataaaccaggaaacacttcattaaaaaaattatgcaagtcagtgtaaaagaagattaaaattccacatgggcaaaggacacacgttggcgataaatatgcagataagaaaaaaaacctatataacattattactcctcaaagaaattggtatgaaaacaataaaaatgtgtagcttatcaaaccaacaaaaatttaaaaatatgaaatccattttaagtaatgataaaatgggtgcactcttagtgctttatagaatagtagtataatgaacctcatgtgtgtaccaaccagctctttcatatcttaacatttagcaacatttgatttagctctttcttttttccaagatagaaaagttaatattgttgaagactcctgcattcttttccctagtcttattttcttccctcccataaatgtgttaaaatctctgtgtgtattgttttggttgtatttttacataaaactttacatattatataaaatttaattgaaggtaaaatttattaaattattcttaatatatattgtaatttaaaaattaacagcttcattgtcttgataaaatttatggtatcttaaacatgtgcttgtttttctaagagaacattgaaacatagattttaaaacaaattgttgaaagattaaaaaatctgcctttgcacactgttacattgaaagtggggcatttgtcgtgaacattcatttcaaatatgtagtatcttcagaatatttgagaaggatttgtattatataattgaaaaatctgttaaattgtatttatgttaactgcttaattctaataaaatttccattcattttttagtatctgcatatatttacatcaaatggattcattcacttatttaagaggcagtactaattacctatagcgttcaagactgttaggtagagggtgtgtagtggtgagtacaacaggcgtgagccctaccaacacggagtttaaagcctagtagaggatatagacttaaacaatttcacaagtaaatacataattacaaattataatacatgctatgaaggaaacataggaggtaccagagaaggaagagtgctttgcatttttatttttaagaccgaagagtgctattggaggactttgagcaagtgaatgacatgatctaacctaccttcgttcattcattcattcattcattttcttccttcctggctcaagcagtcctcccacctgagctccccaaatagctgggactacaggtacacactaccacacctaatttttttttgtattttttgtatttttgatgggattttaccatgttggccaggctggtcttgaactcttgacctcaggtgatccacctgtctcggcctcccaaggtgttgggattataggtgcctagcccatggtgcctagccctaacctacatttataaactatcacttgctgctgtgtggagactatattgtgagattaacagcagggatacctgctaggaagcaattgctgcagattgcctgagacaaaatagttatcatggactagggggatggtggtggtggtggtggtaggtggttggatgtaggatatattttgaagataggtaaatggtgcaagattatgggtcagttttaaatgcttaagtaaattttctttgtaagacattttaggatgccatgttaagaatctctttataactgtcatttaaaaaaaaaccacatattttcttagcataatttcccatagtaacattactatgtcaaaggctatgaacatttgaatgactttagataaatactgtaattgctttccaaaaatattgtgcttattatgtcaccagaaatgtttgaattctgtctacaattcagtcttgccagtatagtacatttcatttagaaaaattttttactatgtagatggaaaaaataatattttagctgggagtggggggactatggggaataactttccttcatttaatattttattgtgagttagtttaagttactttattttatcgtagtttcctaaggctacaaattagtaaccttggtaacttatgtacctaatttaaaagtttacttttttgaaaggctggaaatactaattaaaaacgtaacaccttcatccttgtctttgctccattattaactagtttcattacagaatctctgtgttttaaaatcagatgggttttcataaccagtactttctcagagtggtaaatttaaaaaaatatataaagagaataaataatatttgttgagaatacttcaaataatgtgaagagttattaacttacagcaggagttggcaaacttttctataaagggccatatgggtctttgtcacaaagtcttgggtttttgtttttgtttttttaaacagctatttaactattcctagctaatgggcaatacaaaaacagtgggcaagatttggcctgtgggcagtagcttgctgaaaccttatttagactctaaattttttgaaagagtctacattgatgcatatttttttttcttcctccaaatacagttgacccttgaacaacatgcgtttgagtgaccatgggtccacttgtgatacacgtttttttcccaaccaaatgcagatatggagggctgacttttcatatacctggatgttcctgggccaactgtaggactagaggctgggggggtcttggaaccaatgccgtgtgtataccagggatgactgtttcttatggcctgacctgaagttggaacagaatctttattaatatataatttttgttgcgtttgttttctctttatatttatccattctttttagatcgtatttcatttaacactttttcttctttagtttttaccaagttgcactgaaaatagctcagtgactaattgcacttctaagagtgaggaccctagttaaaattaactctaaaaatactgaatttttaacctaaaccttttatttctaatcaacagtattatttatgagtaggttatagattactttgaaacggaatgtgtctcagaactttgctatcgatatttttaaggtctggtagggaaaagataataggaatgagatttatcagtgaataggggactgctttcccagtttctcggtcgcactggtgtattcaccatggaagcatcttatgaaatatgtacataaactactaatatcccacattacaggttgactattctttatctgaaatgcttaggacctagaagtatttttggattttggtttttcagagtagggatactcagcctacattggtaagtaaagaatgtgaggtgacaggctgggcgcgatggttgacgcctgtaatcccagcactttgggaggccgaggcggatcacctgaggtcaggagttgaagaccagcctggccaatctgtactaaaaatacaaaaattagctggacacagtggcacgtgccagtagtcccagctactcaggaggctgaggtaggagaatcgcttgaacctgggaggcggaggttgcagtgactcgagatcgtgtcactgccctccagcctaggcaacagagcaagactccatctcaaaaaaaaaaaaaaaaaaaaaaaaaaagaatgtgaggtggcagcaataggtaggaagagtctttggtcagctttacatgctctgtagccatgcctgggtaatgggttgactctaagactctgtgctttgctcccacctcctgctttttcattactctttagaatggtttttaatttgtgatctataggagttctttcaagtatttaataagagaataggctaaattaagtaaatgtcaactgaatgctcaaatctctactaaagagcctcttatttagaaaataaatatccatcttttttttctgactggtgagataattaatttttattacagatggtttggaaaataccatatgctttaaaagataagcacaaaattatagtctaatatgtaggttttcatactttaaaaaattgaaaaccaaagaaaaacatttaacatagcatctagtacaaagaaaagagataagcaagagataaatgtcttttttgggacagagttttgctgttgttgcccaggctggagtgcaatggcacaatctcagctcaccgtaacctccacctcccgggttcaagtgattctcctgcctcagcctcccgagtagctgggattacagtcatgcaccaccaggcccaggtaattttgtatgtttagtagagatggggtttctccgtgttggtcaggctgatctcaaactcccgacctcaggtgatctgcccaccttggcctcccaaagtgctgggattacagacatgagccatcgcacccggccaagataaatgtcttttaaattatctccattaaagacataacctttataacattttgatgtatatattaccagtttttaaacacatagtagatttgtataaatacataaacacatattattgtgatcatgctgcacttagacatctttatattctccttatactgtaaacattttgaaatactttactaacaacatttgtaatgaccattctttctctctttctccctctgatagaatggtctacagagtaattcataaactaaacatactttagaggctgggcgcagtggctcatgcctgtaatcccagcactttgagaggctgaggcgtgcagatcacgaggtcaggagttagagaccagcctgactaacatggtgaaaccccatctctactaaaaaaacagtacaaaaattagccgggcgtggtggcgtgcacctagaatcccagctactcaagaggctgaggcaggagaatcactcgagcccaggaggcagaggttgtagtgagccgagattgcaccacagcactccagcctgggcgacagagcgagactccatctcaaaaaaaaaaaaaaaagatacattaatactatagcctacatgtggaacattaagaaaataattgcttttatgtttatgctttatacctgttgttagccctgcttcttatttcatgatttcatggcttcacattgtaacatccctttaccatattttttgaggactgttttggcagaatgtgtgaaatcttgagcagaagtattacccaaaagtcagaagaaaatcagatttttatttcaagattctgttaaagttacccactcccttcttttacttaatcttatagttgcagttctctctctttttagaaaagaaaaaagaggcccctcaggatttgcagatgaaacaatattgctctttagagatatccatctggctgttagattatttttccacagttttcagaagtggatgaggccattagaatcttgagtattgcccatttccttatgtgtgcctttgactatagataaaatagatgcatgacaattatttataagttgattgatttttcttgtcatttaaatcatcttgaataatagagttggtagagctatcccatttttgaaattattttgttttgtcaataactttttgttaccagcatgtacacttgcattgttgactctccatataatacctttaaaaaatttttttttgtggtaaaatatgcataacataaagtttaccatggtagttttctttcatttgttttgtttttgtttttttgagacggagccttgctctgttgccaggctggagtgcagtggagcgatcttggctcactgcaacctccgcctcccgggttcaagcaattcccctgcctcagcctcctgagtagctgggactacaggcgcccgccaccacgcccggctaatattttgtattttaatagagatggggtttcaccatgttggccaggatgttcttgatctcctgacctcatgatccgcccacctcggcctcccaaagtgttgggattgcaagtgtgagccaccgcgcctagaccatggtagttaattttaagtgttcaattcagtgaccttaagtgtgttcataatgttgtgcaaccatcaccatgttgtctaaccattagcactatctgttttgagaacttttttttatcatcccaaattagaattctgtacctgtcaaatagtccccagtaatcctccctcccccagcccctggtaatctgtagtctacttttcgtctttttgaatttgcctattttaggttcctcatataagtggaattatgtggtatttgtccttttgtgttggcttacttcatttagcataatgttttcaaggttcatctgtgttgtagcatgtatatacaggttgaagcatccgttatccaaaatggttgtgaccagaagtggtttggatttcagattttttttttggattttggaatattcatagatacttaactggttcagcatccctcgtccaaaaatccaaaatcagatggagctcagtggctcatgcttgtaatcccaacacgttgggtggccaaggcaggaggatcgcttgagcccaggagttcaaccagcctgagcaacacaagaccctatctctccaaaaaaaaaaaaaaaaaaaaaaagatgaaagaaaaaaaaatccaaaatcaaatgctccagtgagcatttccttttagcatcatgtcaggctctaaaagttacaggttttggagcattttggatttcagatttttggattaacctgcattaatgctcaacctatatgaaattttattcctttttatggctgaataatgttccactgtatgtatatactacattttgtttatccattcatctgttaacagacacttaagttatttccacattttgggtattataaatagtgctgctgcgaacattggtgtacatgtatctgtttgagtccctgtttttagttattttggttatatacctaggaatggaattgctgatcatatggtaattctgtgtttaactttttgaggaactaccactgttttccacaatggcatcaccattttacattcccaccagcaatgcacaaagatttcagtgtctgtatccttgctaacacttattttccattttttgagtttttttgttttgtttttttaataatagccaatcctaatgggtatgtggtagcatctcatggttttgattttattttcctgactattgatgatgttgagcatcttttcaggtgcttagtggccatttgtccgtcatctttggagcaggaacaatgtcttttcaagtcctttgcccatttttaaattgaattttttgttgttgagttgtatataacaccttttttgaagtaaaaggtgcactgtaataatccagactgtgtttctcccttctcaggattcctacaggaagcaagtagtaattgatggagaaacctgtctcttggatattctcgacacagcaggtcaagaggagtacagtgcaatgagggaccagtacatgaggactggggagggctttctttgtgtatttgccataaataatactaaatcatttgaagatattcaccattataggtgggtttaaattgaatataataagctgacattaaggagtaattatagtttttattttttgagtctttgctaatgccatgcatataatatttaataaaaatttttaaataatgtttatgaggtaggtaatatccctgttttataaatgaagttcttgggggattagagcagtggagtaacttgctccagactgcatcggtagtggtggtgctgggattgaaacctaggcctgtttgactccacagccttctgtactcttgactattctacaaaagcaagactttaaactttttagatacatcattaaaaaagaaaaccataaaaaagaatatgaaaagatgatttgagatggtgtcactttaacagtcttaaaagcaatcgtgtgtatagcatagaattgcttggattggataaacagtggcattatatattttaaaaaataaaagttttgaaagattgaagaatttgggcattacagttctcttaaatctgacaaagctgcataaaactattaaaataatcattattatactattttatattctatttctttgagggtttagttttccaaaaactacatattaagcaaatgaatcactcagtggctatgtcatataataacgagttagcctagttataagaagtttaacattttatttaagaacattgttacagcatgtttactgtatagtctagtaatagaggaaaagacatttgggtgggtggtagtggtagtatttttatagaggagttaccaaatttcagctctattatccaagtttacccagctaatggtgttcggaaccgggaatttgagccaattctgactctgttgtctgctctgctccttcttttgtgctgtgtctttgaaagtcacctaaaattgtgagggaatgtaatttcaccccaaatttagagtttatgcacttgttatattgaaaatgattaacatgtagaagggcttttaatggaataagtggtgtagtaacttcagtgttgcctacctagaaatcaaaatctttctagttgtccactttgttttttgaaaaagtaatatgaaaattatgttaatgctttaattcaggtttttgtaaaatattttttatctttacacatttaacatacgtttctaaaattatagtctgttatatagcactttgggtctagaatttttcagtagtttctgttttactattatgatctacctgcatattaacctattaggttatagttttactatacttctaggtatttgatcttttgagagagatacaaggtttctgtttaaaaaggtaaagaaacaaaataactagtagaagaaggaaggaaaatttggtgtagtggaaactaggaattacattgttttctttcagccaaattttatgacaaaagttgtggacaggttttgaaagatatttgtgttactaatgactgtgctataacttttttttctttcccagagaacaaattaaaagagttaaggactctgaagatgtacctatggtcctagtaggaaataaatgtgatttgccttctagaacagtagacacaaaacaggctcaggacttagcaagaagttatggaattccttttattgaaacatcagcaaagacaagacaggtaagtaacactgaaataaatacagatctgttttctgcaaaatcataactgttatgtcatttaatatatcagtttttctctcaattatgctatactaggaaataaaacaatatttagtaaatgtttttgtctcttgagagggcattgcttcttaatccagtgtccatggtactgcttttggctttggtttctttctacattgaaaatttctcttcaattctgagcacatgttaacatttagaattcaagaggtggggatttttttttcccatggttacatatatatatatatatatatatatatatatatatatatatatatatataaagaacagggcaacaaatttttgcgttttctatttcggtagtacttttaaaccattatgtcatgtttctaggttaaacgttgttgtatttgaagaattttactttggcagaatttttttgaggatgtgtttatttctggagaaaggtctcattaaagaaagacaatacccagaaagccaacagaaattctgttactcatttaatgcatttttctgacaaaaattattgccagagagaacctgaattttgtttcaaaaatcatctttgttttaaaaatgactttttcttcaggtaaaataaaataatttcagttgctattatttaacctgtttgtatgaagagtttaacatataggaaatgaatacataaagataggaaggaattaattgttatatgtagtcatatgtctcttaatgacagggatactttctaagaaatacattgttaggtgattttgtcattgtgcaaacatcatagaatatacttacacaaaccttggtagtataacctactatacacctgggatatgtagtatagtctcttgccccagggatacaaacctgtacagtatgtaactgtactaatgactataaggcaattgttaacacaatggtaagttttgtgtgtctaaacctacacttgggctaccctaagtttatatatttttttaaatttctgttcaataataaattaaccttactttactgtaactttttaaactttttaatttttcctaacattttgacttttgtaatacagcttaaaacacacattatacagctatacaaatttttctttccttatatctttattctgtaagcttttttccatatttaaaattttttgtttgtttttacttattaaacttttttgttaaaaactaagacatgcatgcacattaacctaggcctacacagggtcaggaccatcaatatcattgtcttccacttccacatcttgtcccactggaagatcttcaggggcagtaacacacgtggagctgtcatctcctataataacattgccttcttttggaatacctcctgaaggacctatccaaggctgtttatagttaacttttttttttttttttttttttttttagtaaataggaggagtacactataaaataacaatataggtgctataccattatacaactgacagtgcagtaggtttgtttacaccagcatcaccacaaacacgtgagcaatgtgtcgtactacagtgttaggatggctataacatcactaagcaataggaacttttaaactccattataatcttatgggaccactatcacatatgcaatctcctgtggaccaaaatgtcattatgtggtacatgactgtactaagaaattgatccatctatattccatcaatttgtttagggctttttctggttacatttacctgtgagcccagaaaaccagttttgtagaaattaacttctgtaatgctaggagttaaaaaaaattgctgaacaacttttacattgttaaacatttaaaaacaagcgttctagaagtttatcaaatttcataaaggtgcaaaaatgtaaatgtaaatcattatccagctaatatatatgttgtatttccctagtaggagagcatatgtacctcttcctagttatacaaatttgatatatagtaaagaaacagtaaattctacttcaagtcattttgggaggattaaaaactgaatttctctagtttgaccattgtacagatttatctggcaattttactaaaacctgatttataggttaaacttggtgtatatcatatatcactttactttagaggaattaagatttcacataaatccatttccaggttccaaagaccaggaagaggcttggtttttgtttttctttttactgtctttacagtctccttgacttttcttaggagagaaggtactgagaaaacatgattctaatatttattattttttcttccaacattttcttatgaaacattttcaaatacaaaattgagttttatttaaaacatttgcaaatatactacctagattctaccattgttgttttatatttgctttacttacaacttttaaaagatgctttttataccactgaacattttagcttacatttcacaaagaaaagaaaaaatttaagagactttgcataatgttttaaggggttgcagtaaagaagtgcttcttatattttcttatgcatacaaatcagctgggcttattaaaatccagattctaattcagaaggtttaggtggggaccgagtctgcatttctaacaaactcctaggtggtatttttcttggtacttggaccatactttgagtagaaaagcagtagaggacataaaaagagtcttgttagtcccactttgttgctgtccacttctcatttgataatatcctaaaatagctgtgtctcctttttggtggttgtatgattactacctcagaagtactaattgattcttgctatttgaccttaatactttaatataacacagcattcatatttgatcagaaaactatctggcttccttttataagagatttttaggttttatacagttttgtggccttgggtttttttgtttgatttgtttttttgaaggtatataatatgtaagtagataaacaaatttgatttgtagacatttttatgtggatcatctaattaaaaatggagggatacagtatgaaagaatacttgtacttcttaacagagcactcaacctttcttttacatcctgtttcactgatgttattatgtaatttatgttgctaaactataaattagatatttaatttctgttctttgatttccttttattattaaatggacttgttgatttgcctagaaattaatttgcctttcaaaagtcttattaatcttcctccgttgaaattaatttgatatttgcatgcttctggaagactttaaagagctattccgagtaactgtagagattataaaatgaaatatgggaattttaataaattttacatctccagttactggtgaaaatgtcaagtcctcctttctgcagagtattttgttactcatctgttattcagcttatttatttatttatttatttatttatttttctttctttcttgttttttttttttgagacggagtcttgctttgtcgcccaggctggagtacagtggtgggatcttggctcactgcaggctccgcctcccgggttcacaccattcttctgcctcagcctcccaagtagctgggactacaggcacccgccaccatgccttgctaaatttttgtatttttagtagagacgggtttcactgtgttagccaggatggtctcgatctcttgacctcgtgatccacctgcctcggcctcccaaagtgctgggattacaggcatgagccaccgcgcctggcccttatttgttttttaaacaaaattagtgtgcatatccttgttgtattttatcggcaagttgttttatgccctaacttttggggtcttgatcatgagcctaaaacacgtaaacacccaaaaagaattatattccggttaaaggaacaaaacattcatttagaagttctcatccatgtaaatcagaggctggcaaatattttctgtaaagggccaagatagtaaatgttttaggctttgagggccacaagtggtatctgttgcatttttttttaattatgaccctttaaaatgcaaaaatcgttgttagcttgtgcatagtataaaaataggctggccgcatgctgtggctcatgcctgtaatcccagaaatgaggtgggaagccgaggtgggcacaccacctgaggtcaggagttcgaggccagcctggccaacgtggttgaaaccccgtctctactaaaaatacaaaacttagccaggcgtggtggcgggtgcctgttatcctggctactcaaggggctgaggcagtagaattgcttgaacctgagaggcagaggctgtagtgagcccagatcaagccagtgcacaccagcctggacgaccgagcgagactctgtctcaaaaaaaaaaaaaaaaggctgtggctgcatttggtccattggctgtaatatgctgattcctaattctctgggtaactttagtgtttgattagctactagaagttaggttaaacttttgtattttacaggctaactttaataatcttaaagtaaaacttaacatagttcatggaaaggaaatagaaattttaccctagtactcttttttttttttttttttttttttgaggcagagtctccctctgtcacccaggctggagtgcagtggtgggatcttggctgattgcaacctcctcctcctgggttcaagcaattcttgtgcctcagcctcccgagcagctgggactacaggcacgcaccaccacacctgactgatttttgtatttttagtagagacagggtttcgccatgttggccaggctggtcttgaactcctggcatcaagtgatcctcccatctgagcctcccagtgtgctgggattacagacgtgagtcactgtgcctggtctctagtattttttttttttttgagacggtctcactgttgccaggctggagtgcagtggcgcgatcctggctcactgcaacctccgcttcccggattcaagcgattttcctgcctcagcctcctgagtagctgggactatgggtgcacaccaccacgcccagctaatttttgtatttttagtagagacggggtttcaccatgttggccaatatggtctcaatctcttgacctcgtgatctgcccgtctcggcctcccaaagtgctgggattacaggcgtgagccactgtgcccagctgtactttttaagataagaattgcagggtatatatttttaccaacttaataacttataattttaaaaagctaattacttggctagaatataatgcgttacatattctttacactcagttcagtccatatctgaaaggcaaatagaattattttctgctagtacattgtgtagtccctatgttcctagtgtataaggactgttacctagttcacatttatctgggttgttgacagattttcctggtccctttggacagtgcatggccatgttggcaaaagctgtcaaaattgaaacattgacaccatgagaattgtgtgttttccagtctgctaaaatcaaaagtgggagggttcagtaaggtgaataacagaagcagagttttcggggtatctgttactcctcattcggcttttctgctctctgggggtctcaatttaaatataatgtgaaaattagttttacgaacctaaaaatgttgagtgattcatttcctggttttgttgttaatttctagatatttaaattaattgttagaagaaccccgttaaagaatgctttgcaaaacaacctccttatgtgctatgtctctgtttaatagtagttgagtttgtgtacatgagatcaatattttgaactatagctttttatgagttaaaaattgacggaacagttactgtgcacttgctgtgcaccatggtagtctcccaagtagtggtttttctgcatttcaatagtacatgagataggctgtgggtggcaaggtttcttgagaaagtgagggatgcacagttgggttttagaatacatcttgttcctccatgcccttccccaccaaaaggctggtagtcttgcatttgtatatagttagggtatttgatgtgttgcttccttgacagagttttgcaagaatttgcagatttaacaggaacaaaaacttacttaaaacaaaatctcttagtaaaagcatagtctagcaagatttagaatgatactttggctaacagtactttctctatatggagtgctttgtttccatagcctcacaagtatgttttcagataatagttgagttgaaaatgttgtcaatctcttgattttaaaaaatttacatatttaaagttgtatacttttgttcctacgtattttcagttgttcttaaagtttaataagtgacatttgaaaatgagtatatgtgtataaaaacaaaagtaggctaggcacggtggctcatgcctataatcctagcactttgggaggctgaggcaggcggatcacaaggtcaggagtttgagaccagcctgggcaatatggtgaaacccccctctactaaaaatacaaaaattagctgggtgtggtggtgcatgcctgtagtcccagctactcaggaggctgaggcaggagaatcgcttgaacccggaggtggcggttgcagtgagccgagattgcaccactgcagtccagcctgggcggcagagcgagactccatctcaaaaaaaaaaaacaaaaaaagaaaaagttaaaaaaaaacaaaaaacccccacaaaatgagtatatgtggcaacaagtcctattctcaaaaaaattattgtgtgctagttaagagcttaatgagtagccagtcggtattaaatatctgtttcagctatattttatctttaaaaattatctacagattttggaatgtgaaaaactagtgttttgtttcataggtatatactgtaggcattttaaaaataagagccagtgccagtggtttacagtgtacacaaggataatgttctcatgttctcttgatgtcagtatgactttaaagcatattatcaagaaataactaagtctgaaaaactgtggtaaataactggtactctaaaacctaagtttcttattactaaaaataagaaatggtaaaagtcaccctgtgctgttaattatatgagccactgaggtcctgacactgaattcttggtggtggataataatctcttctttttaattattggcttccaattctctctgcattgctggaaacaaaaatcatatatttcactattggtggtggggatgctgtcactgaaaaagtagacacattcatattgattttagaaataagttaaaatcaaaatttgcttctgctaaattagtagaggaccaatactgtttttctccttcatagtatgttttggtacttctacattgacattataacttttttttttttaaacagaaatagaagtttacattcttagaa

SEQ ID NO: 32 - protein, 188 aa, Artificial Sequence [sequence omitted]

SEQ ID NO: 33 - DNA, 5306 bp, Artificial Sequence
  KRAS G12D mRNA
ctaggcggcggccgcggcggcggaggcagcagcggcggcggcagtggcggcggcgaaggtggcggcggctcggccagtactcccggcccccgccatttcggactgggagcgagcgcggcgcaggcactgaaggcggcggcggggccagaggctcagcggctcccaggtgcgggagagaggcctgctgaaaatgactgaatataaacttgtggtagttggagctgatggcgtaggcaagagtgccttgacgatacagctaattcagaatcattttgtggacgaatatgatccaacaatagaggattcctacaggaagcaagtagtaattgatggagaaacctgtctcttggatattctcgacacagcaggtcaagaggagtacagtgcaatgagggaccagtacatgaggactggggagggctttctttgtgtatttgccataaataatactaaatcatttgaagatattcaccattatagagaacaaattaaaagagttaaggactctgaagatgtacctatggtcctagtaggaaataaatgtgatttgccttctagaacagtagacacaaaacaggctcaggacttagcaagaagttatggaattccttttattgaaacatcagcaaagacaagacagggtgttgatgatgccttctatacattagttcgagaaattcgaaaacataaagaaaagatgagcaaagatggtaaaaagaagaaaaagaagtcaaagacaaagtgtgtaattatgtaaatacaatttgtacttttttcttaaggcatactagtacaagtggtaatttttgtacattacactaaattattagcatttgttttagcattacctaatttttttcctgctccatgcagactgttagcttttaccttaaatgcttattttaaaatgacagtggaagtttttttttcctctaagtgccagtattcccagagttttggtttttgaactagcaatgcctgtgaaaaagaaactgaatacctaagatttctgtcttggggcttttggtgcatgcagttgattacttcttatttttcttaccaattgtgaatgttggtgtgaaacaaattaatgaagcttttgaatcatccctattctgtgttttatctagtcacataaatggattaattactaatttcagttgagaccttctaattggtttttactgaaacattgagggaacacaaatttatgggcttcctgatgatgattcttctaggcatcatgtcctatagtttgtcatccctgatgaatgtaaagttacactgttcacaaaggttttgtctcctttccactgctattagtcatggtcactctccccaaaatattatattttttctataaaaagaaaaaaatggaaaaaaattacaaggcaatggaaactattataaggccatttccttttcacattagataaattactataaagactcctaatagcttttcctgttaaggcagacccagtatgaaatggggattattatagcaaccattttggggctatatttacatgctactaaatttttataataattgaaaagattttaacaagtataaaaaattctcataggaattaaatgtagtctccctgtgtcagactgctctttcatagtataactttaaatcttttcttcaacttgagtctttgaagatagttttaattctgcttgtgacattaaaagattatttgggccagttatagcttattaggtgttgaagagaccaaggttgcaaggccaggccctgtgtgaacctttgagctttcatagagagtttcacagcatggactgtgtccccacggtcatccagtgttgtcatgcattggttagtcaaaatggggagggactagggcagtttggatagctcaacaagatacaatctcactctgtggtggtcctgctgacaaatcaagagcattgcttttgtttcttaagaaaacaaactcttttttaaaaattacttttaaatattaactcaaaagttgagattttggggtggtggtgtgccaagacattaattttttttttaaacaatgaagtgaaaaagttttacaatctctaggtttggctagttctcttaacactggttaaattaacattgcataaacacttttcaagtctgatccatatttaataatgctttaaaataaaaataaaaacaatccttttgataaatttaaaatgttacttattttaaaataaatgaagtgagatggcatggtgaggtgaaagtatcactggactaggaagaaggtgacttaggttctagataggtgtcttttaggactctgattttgaggacatcacttactatccatttcttcatgttaaaagaagtcatctcaaactcttagttttttttttttacaactatgtaatttatattccatttacataaggatacacttatttgtcaagctcagcacaatctgtaaatttttaacctatgttacaccatcttcagtgccagtcttgggcaaaattgtgcaagaggtgaagtttatatttgaatatccattctcgttttaggactcttcttccatattagtgtcatcttgcctccctaccttccacatgccccatgacttgatgcagttttaatacttgtaattcccctaaccataagatttactgctgctgtggatatctccatgaagttttcccactgagtcacatcagaaatgccctacatcttatttcctcagggctcaagagaatctgacagataccataaagggatttgacctaatcactaattttcaggtggtggctgatgctttgaacatctctttgctgcccaatccattagcgacagtaggatttttcaaacctggtatgaatagacagaaccctatccagtggaaggagaatttaataaagatagtgctgaaagaattccttaggtaatctataactaggactactcctggtaacagtaatacattccattgttttagtaaccagaaatcttcatgcaatgaaaaatactttaattcatgaagcttactttttttttttggtgtcagagtctcgctcttgtcacccaggctggaatgcagtggcgccatctcagctcactgcaacctccatctcccaggttcaagcgattctcgtgcctcggcctcctgagtagctgggattacaggcgtgtgccactacactcaactaatttttgtatttttaggagagacggggtttcaccctgttggccaggctggtctcgaactcctgacctcaagtgattcacccaccttggcctcataaacctgttttgcagaactcatttattcagcaaatatttattgagtgcctaccagatgccagtcaccacacaaggcactgggtatatggtatccccaaacaagagacataatcccggtccttaggtagtgctagtgtggtctgtaatatcttactaaggcctttggtatacgacccagagataacacgatgcgtattttagttttgcaaagaaggggtttggtctctgtgccagctctataattgttttgctacgattccactgaaactcttcgatcaagctactttatgtaaatcacttcattgttttaaaggaataaacttgattatattgtttttttatttggcataactgtgattcttttaggacaattactgtacacattaaggtgtatgtcagatattcatattgacccaaatgtgtaatattccagttttctctgcataagtaattaaaatatacttaaaaattaatagttttatctgggtacaaataaacaggtgcctgaactagttcacagacaaggaaacttctatgtaaaaatcactatgatttctgaattgctatgtgaaactacagatctttggaacactgtttaggtagggtgttaagacttacacagtacctcgtttctacacagagaaagaaatggccatacttcaggaactgcagtgcttatgaggggatatttaggcctcttgaatttttgatgtagatgggcatttttttaaggtagtggttaattacctttatgtgaactttgaatggtttaacaaaagatttgtttttgtagagattttaaagggggagaattctagaaataaatgttacctaattattacagccttaaagacaaaaatccttgttgaagtttttttaaaaaaagctaaattacatagacttaggcattaacatgtttgtggaagaatatagcagacgtatattgtatcatttgagtgaatgttcccaagtaggcattctaggctctatttaactgagtcacactgcataggaatttagaacctaacttttataggttatcaaaactgttgtcaccattgcacaattttgtcctaatatatacatagaaactttgtggggcatgttaagttacagtttgcacaagttcatctcatttgtattccattgattttttttttcttctaaacattttttcttcaaacagtatataactttttttaggggatttttttttagacagcaaaaactatctgaagatttccatttgtcaaaaagtaatgatttcttgataattgtgtagtaatgttttttagaacccagcagttaccttaaagctgaatttatatttagtaacttctgtgttaatactggatagcatgaattctgcattgagaaactgaatagctgtcataaaatgaaactttctttctaaagaaagatactcacatgagttcttgaagaatagtcataactagattaagatctgtgttttagtttaatagtttgaagtgcctgtttgggataatgataggtaatttagatgaatttaggggaaaaaaaagttatctgcagatatgttgagggcccatctctccccccacacccccacagagctaactgggttacagtgttttatccgaaagtttccaattccactgtcttgtgttttcatgttgaaaatacttttgcatttttcctttgagtgccaatttcttactagtactatttcttaatgtaacatgtttacctggaatgtattttaactatttttgtatagtgtaaactgaaacatgcacattttgtacattgtgctttcttttgtgggacatatgcagtgtgatccagttgttttccatcatttggttgcgctgacctaggaatgttggtcatatcaaacattaaaaatgaccactcttttaattgaaattaacttttaaatgtttataggagtatgtgctgtgaagtgatctaaaatttgtaatatttttgtcatgaactgtactactcctaattattgtaatgtaataaaaatagttacagtgac

SEQ ID NO: 34 - protein, 189 aa, Artificial Sequence
  KRAS G12D protein Isoform A
MTEYKLVVVGADGVGKSALTIQLIQNHFVDEYDPTIEDSYRKQVVIDGETCLLDILDTAGQEEYSAMRDQYMRTGEGFLCVFAINNTKSFEDIHHYREQIKRVKDSEDVPMVLVGNKCDLPSRTVDTKQAQDLARSYGIPFIETSAKTRQRVEDAFYTLVREIRQYRLKKISKEEKTPGCVKIKKCIIM

SEQ ID NO: 35 - DNA, 32738 bp, Artificial Sequence
  Genomic Sequence for KRAS (WT)
gattttcctaggcggcggccgcggcggcggaggcagcagcggcggcggcagtggcggcggcgaaggtggcggcggctcggccagtactcccggcccccgccatttcggactgggagcgagcgcggcgcaggcactgaaggcggcggcggggccagaggctcagcggctcccaggtgcgggagagaggtacggagcggaccacccctcctgggcccctgcccgggtcccgaccctctttgccggcgccgggcggggccggcggcgagtgaatgaattaggggtccccggaggggcgggtggggggcgcgggcgcggggtcggggcgggctgggtgagaggggtctgcaggggggaggcgcgcggacgcggcggcgcggggagtgaggaatgggcggtgcggggctgaggagggtgaggctggaggcggtcgccgctggtgctgcttcctggacggggaaccccttccttcctcctccccgagagccgcggctggaggcttctggggagaaactcgggccgggccggctgcccctcggagcggtggggtgcggtggaggttactcccgcggcgccccggcctcccctccccctctccccgctcccgcacctcttgcctccctttccagcactcggctgcctcggtccagccttccctgctgcatttggcatctctaggacgaaggtataaacttctccctcgagcgcaggctggacggatagtggtccttttccgtgtgtaggggatgtgtgagtaagaggggaggtcacgttttggaagagcataggaaagtgcttagagaccactgtttgaggttattgtgtttggaaaaaaatgcatctgcctccgagttcctgaatgctcccctcccccatgtatgggctgtgacattgctgtggccacaaaggaggaggtggaggtagagatggtggaagaacaggtggccaacaccctacacgtagagcctgtgacctacagtgaaaaggaaaaagttaatcccagatggtctgttttgcttggtcaagttaaacccgaagaaaacccgcagagcagaagcaaggctttttccttgctagttgagtgtagacagcaatagcaaaaatagtacttgaagtttaatttacctgttcttgtcctttcccctatttcttatgtattaccctcatcccctcgtctcttttatactaccctcattttgcagatgtgttctacatctcaagagttattacagtactccaaaacagcacttacatgattttttaaacttacagaggaattgtagcaatccaccagctaaccgcctgaaatagacttaaacatgtgcatctcctttttttttttttttttgagacacagtctcgctctgttgcccaggctggagtgcaatggcgcggtatcggctcactgaaacctccgcctcctgggttcaagcaattctcctgcctcagcctcccgagtagctgggactagtaggtgcacgccaccatgcccagctaatttttgtatttttagtagagacagagtttcatcatgttggtcaggatggtctccatctgctctgttgcccaggctggagtgcagtggcgccgtctcggctcactgcaacctctgcctcctgcattcaagcaattctcctgcctcagcctcccgaataactgggattacaggtgtctgctgccatgcccggctaattttttgtatttttagtagagacgggggtttcaccatgttggtcaggctggtctagaactcctgacctcgtgatctgcccgcctcggcctcccacagtggcatgtgcatcttatagctgaagtctaagccttcttaaatcttgagatccatcaaaacagacaggttttctaattgttatacaatgtatatgttatgtttataatagaaatcattttacaaataagttataaatgggaaaggtctatttgtaattatcagctcagaattaaccataaaactggtgtcactgaagtgactgaggtccaaaatgctgactctgcatgttatagactacagatatcaaatatggttgctaacaatagtttactttgagactgtagccatccacagtatatttgcttttaagagatggtagatggtaattcagttttatgaaaaataaaaatgaattttcttccattacaaaattgttggattcgagtccagtccactccttactagcttttctaactctcggtgagggatcccctcccagcccatgatcttcatttggtaagactcctttggaacccagttctctctagtggatttaaatgtgatttggttttaaaaatctcattcaaggaattttttttttttctggaaacaaccaccgcataaacaagtaaaccggaagatacatgtggctctgaattcatatatatacacaaactctaatccaatgtctgtccacagtatttcctaggctagtaaactttttggccttaacgacccctctaccctctttgtttttttgagagagagagtctcactctgtcacccaggccggaatgcagtggcgcgatctcggcccgctactacctccgactctcaggctcaagcgattctcccgcctcagcttcccgagtagccgggattacaggctcccgccaccgggctaattgtatttttagatacgggatttcaccatgttggccaggctggtctcgacctcctgacctcaggtgatccgcccgcctaagcctcccaaagtgctgggattacaggccaccacacccggcctacactcttaaaaattatcgaaggggccgggcacattggctcttatctgtaatcccagcactttgggagactgaggcgggaggatcgcttgaggccaggagttggagaccagcgtactcaacatagtgagaccttgttataaagaaaaaaaaaatccaggattaaaaaaaatctttgatttgtttgggatttattaatatttaccgtattggaaattaaaacaattttttaaaatgtattcatttaaaaataataagcccattacttggtaacatgaataaaatattttatgaaaaataactattttccaaaacaaaaccaaaacttagaaaagtggtattgtttcacacttcagtaaatctctttaatgatgtggcttaatagaagatatggattcttatatctgcatctgcattcaatctattatgatcacacatctggaaaacttgtgaaagaatgggagttaaaagggtaaaggacatcttaatgttattatgaaaacagttttgacctcttgcacaccagaaaagtcttagtaacctgaggggttcctagaccacattttgagaactgttttaggctatgcaaactggttggggggaggttggggtaggcagagagctagaagatacattttagtgtaattctcctcatctattcctaattgctttggcctacatttgaaataaagcgtggaggcaaacgggataagatacatgtttgtagtggttgttaacttcaccctagacaagcagccaataagtctaggtagagcagagtaaggcggggaactatgccgtgaccgtgtgtgatacaatttttctagcctgtggtgctttttgcggcagggcttaggagtaaggttagtatgttatcatttgggaaaccaaattattattttgggtcttcagtcaattatgatgctgtgtatatttagtgtttatctacaatatatgcacattcattaatttggagctactcatcctataataaatagttgtgcatttactcccatttttttctgcatttctctccttatttataattatgtgttacatgagggaaaggaggtgaaattaaacattcatattatttcaaaaaatttgaaacaactaactaaaaaatatgttttattttctgtatggtgtttgttatacaatctgtcaatattcatgcacctcttgggagacagtgtatgaaaagcaaagagtaacagtcacatggattactgattactgagatatattcacttgcatctttttttttttttgagacggagtggctctgtcgcccaggctggagtgcagtggcgtgatctcggctcactgcaagctccgcctcctgggttcacgccattcttctgcctcagcctcccaagtagctgggactacaggcgcccgccaccacgcccggctaatttttttatatttttagtagagacggggtttcaccgggttagccaggatggtcttgatctcctgacctcgtgatccaccctcctcggcctcccaaagtgctaggattataggcgtgagccaccgtgcccggctcacttgcatctcttaacagctgttttcttactaaaaacagtgtttatctctaatctttttgtttgtttgtttgttttgagatggagtcttactccgtcacccaatctggagtgcagtggcgtgatctgggctcactgcaacctctgcctcccgggttcaagtgattctccttcctcagcctccccagtagctaggactacaggagagcgccaccacgcctgattaatttttgtatttttagtagagagagggtttcaccatattggccaggctggtcttgaactcctggcctcaggtgatccacccgccttggcctctgaaagtgctgggattacaggcatgagccgccgcacccggctttctaatctttatctttttttgtgcagcggtgatacaggattatgtattgtactgaacagttaattcggagttctcttggtttttagctttattttccccagagatttttttttttttttttttttttgagacggagtcttgctctatcgccaggctggagtgcagtggcgccatctcggctcattgcaacctcggactcctattttccccagagatatttcacacattaaaatgtcgtcaaatattgttcttctttgcctcagtgtttaaatttttatttccccatgacacaatccagctttatttgacactcattctctcaactctcatctgattcttactgttaatatttatccaagagaactactgccatgatgctttaaaagtttttctgtagctgttgcatattgacttctaacacttagaggtgggggtccactaggaaaactgtaacaataagagtggagatagctgtcagcaacttttgtgagggtgtgctacagggtgtagagcactgtgaagtctctacatgagtgaagtcatgatatgatcctttgagagcctttagccgccgcagaacagcagtctggctatttagatagaacaacttgattttaagataaaagaactgtctatgtagcatttatgcatttttcttaagcgtcgatggaggagtttgtaaatgaagtacagttcattacgatacacgtctgcagtcaactggaattttcatgattgaattttgtaaggtattttgaaataatttttcatataaaggtgagtttgtattaaaaggtactggtggagtatttgatagtgtattaaccttatgtgtgacatgttctaatatagtcacattttcattatttttattataaggcctgctgaaaatgactgaatataaacttgtggtagttggagctggtggcgtaggcaagagtgccttgacgatacagctaattcagaatcattttgtggacgaatatgatccaacaatagaggtaaatcttgttttaatatgcatattactggtgcaggaccattctttgatacagataaaggtttctctgaccattttcatgagtacttattacaagataattatgctgaaagttaagttatctgaaatgtaccttgggtttcaagttatatgtaaccattaatatgggaactttactttccttgggagtatgtcagggtccatgatgttcactctctgtgcattttgattggaagtgtatttcagagtttcgtgagagggtagaaatttgtatcctatctggacctaaaagacaatctttttattgtaacttttatttttatgggtttcttggtattgtgacatcatatgtaaaggttagatttaattgtactagtgaaatataattgtttgatggttgatttttttaaacttcatcagcagtattttcctatcttcttctcaacattagagaacctacaactaccggataaattttacaaaatgaattatttgcctaaggtgtggtttatataaaggtactattaccaactttacctttgctttgttgtcatttttaaatttactcaaggaaatactaggatttaaaaaaaaattccttgagtaaatttaaattgttatcatgtttttgaggattattttcagatttttttagtttaatgaaaatttaccaaagtaaagaccagcagcagaatgataagtaaagacctgtaagacaccttgaaggtcatggagtagaacttccatcccaagcagatgaggatttatttaatctcaaagacctccaggaggggacattccccaactgtccttgttaactcattttcagaacatatttattagcatattttacatgtaatttggatcttcatgttaaatttaacatcagtggagatggaaaataagcatatcgccttgtctttgaaatagccctatattgttagattgtttcttaggcttctttaccctgggttaagcagtcctaatactttagcatttattctacatctagtgtactaatttaaaaaaatcagttctgaaaaatttctaagaactttcttcaagttccaagctgtgaaatctagaacaggtcaaagtgccttattaacgtactgtactgtgtagtgtcttgaagagacactttgcgctgaggcaagttctgagggcattgggtggccttgggaagatatttatgcagtttagaacctggagaattgattagataactaatcataaggaaacgtcacatatttttggtactataaaaaagtggagaaataatgcctatttgcaaagatttgatttaaacatagaaacaactttatttggcttccaattttaagaatttacagcagtaaaggggaacagtctaattgaagtagactgcctatgcaatagtctctgtatatttacttttgacaagttaattcaatgtgtactatagttttgtttctttgaagaggtttgaatagtgcacccattttaatctgtattgcaaattcagggttacttggcagactctactatttaaatcagatgtaaaaggaagttttaatataattcactttatgcctgaaagttttcctgggattttggaaggtgattttactggaaatgctgtctgtcttccctgaaaatctgagaaattccattacactttgtttccaatcagaggtcatgagtgctatatgagtatatacagcatgacgtcatgaatgtgataaagtgggttaggaaaccttttgctaatgattgttaaaatgcaatataaatgttgaagaaataaagctaacagttaagcctttatttgggcggaaggctgaaaaagtttataaacttaaacctataactctgcttatgatttctgccaaaccagaagacttgactctgggaagcattggttacctgtgaactttgaaactgacggtccctgacgtagtttagtcacctgggaaaaggtatctgagattatctcttatctcccaagttacagtgagtctctgagggaactgacacattacattaagttcttggtgtagttaaactgtaagaaaggcaggagaacttagtagttaaatagttggttaaatggaaatgctgactccatgttattgtaaaaagttaaaaatttaggaggatatggggatttcactgccattgcaggttttgattggtatttaccaatccgtgtgggtcagagagaaaattagaaaggatatgactgcacattttggaattattagcagtttttctacatttaaaatggaaataaattttttaaaaatttaaatcaagtaatactgtattttttggtgatttagatttttcaaaatttacactaagagatagtaaggagggtggctattgtttctttcaataatgtctctgagaggttgtaactcatctaaggatacgtagctaataagtggtaggatttcaatttaaattctctgagaccaagttaagtagaatttgcactgtactcttgtataactttttaaaactgaaaattagctatctttcaaattaagaaaatatttactaatggagactaattcagatttgtaagtataccaaaatttgaacttagcctgctatctaatggcaacttagtggcagaggtatgatgtaaaatcattcaggtatgacacatagatggagtatgtttgtattcgaggctgtgcacataatcacctttacttgtattgtgaagtatatattgttatcttttatgaagcccactaaagagataatgaaatacctcgttattagggcaagattattgaaaactcaaaatagcccccaaacacaatacttggctagaaatatatacctttatagttcagagatcatttattatcaaaaccctgaagttttttttctaaggtaaaatttggtggaagaggaaaagtctcgttttaaaaaaatgtaggtagttacagagatcagaatgattagttgatcacttaccaaatatatattaagtatctactgtatataatatgctagtaagaataaatatagcaggaagtattttttcccaggctctaattgtttgacatcagcatgcttttattgtggcacttataattcagttcaagtattatgcccctctttgatggaacagtttcctattcagtaaggaagaccagattaatcattggattggtttgtttcatctttagtgttctgagctgtagagtatttatttaccaaggtttattttaatttttattttatttttatttttccatgttcattgtagaattcattttacctacgaatgaagtatgtagattatagagagaaaatttgtaaaattaaactgatactgaagactggtataagaaaagccttatgtaatttgtaagctgctattcttctgagtttatacatatatctttagtaatcaatgagggatggttgggtgactgccctccaggggacatttggcaacatctggagatgtttttggttgccacaacttggggagagagtactgctactggcatctattgagtagatgctattactttaaatggcaaagctgcagttacctttgcaccaacctaatattaaacttcctgcagtgcacgggaaagcccccacaacagggttatctgaccccaaacctcaatggtgttaagatccaaaccttgatatgttaacctgtagctttaaacatcctttaaattgtcaaattcatgtccctgacataaggtttatgttagattttcaagtataacaaagatttaaactttaacttttgtacgttaatgatatgttagcttactccagtcttctattaaaacattctgtttttaaaatcagagacacacagcaattttataaatcatttctcttcaaggctgtgaagctctccccacttttgtgagtgccctctactggtcaaattatttgctttataacaagtaacagtgaaatcctaagtttgtgtagtttcgctgtttaaattatgggtggcatcaatttataaatatattcgttttatttaaaagtcttatatgattgatttcgtatcatttttgctctctgctaatattaatataaagattactgtctgtattagttaggcctaactaagtaggtgagtatagtgaactaagaaaggaaacgaggcagtatataagaaaatagggtggttcagttgttaacacttactgagcttactttgttgaagggactaaaaggcagcagtgtggctctctgagcttctttgcatgcactcaggagctgcttaatggagtccaaggcttggtggtgtgttacaggggatgataggagggtcctattcagaagtggcaaattgtgaaagtgcacattttgtagagttttataggactgtagaatagttgtgagcacctgatttttagaataaacagaaaactcaggtactgtatttaggtcaaattaagaataagtatttattaagacctgaatataaaactttactggtcatggtttttttctaccttgggtttttataaatccaaagatttaaaaacatacaaatggaagttggtaatggaattaagtgaaaggaaaaaatgattttatggtttggaatctcctaagattctggttttaacaatacaactaattccttaatcctagaaatgttcttcactgcccactttgtaccatgcagtcttcctgtgggctagagatacactgaggcgcaaaacagaccagattcctgccttcatggagcttattagttttaggtatctctagatttcttgtaatacctattacaatgcctgcacatcagttcattcatgtgggttcaacgtagtactcagtacatggcaaattcaagttttacttttcggaacttcatggatttttttcctcagaatatcttttatccataattggttgaatctgtagatgcagtacccatggatatggatggcccactttattttgaagagcagtgtttctaggcaatcatgctaattatatatgacttaatttagaggctttatacttaagagcattacatttctggcgtctcttaaccattattatttcataatgtgtaggttatggaacagttaaattattgggatcttaatatagaaattagtagaaataagccagatatggtggctcatgcctgtaatcttagcactttgggaggctgaggctattcgctgtactattttttactacttttctataggtttgaaattttttcaaaataaaacattgaaaaaagtaaggtaggtagtgtgtccctccttaatcctttcaaatattttattttcactatttctattaatttttttttttgtttttgagatggagtctcgctctgttgcccaggctggagtgcagtggcgcgatcttggctcactgcagcctccacctcctgggttccagccattctcctgcctcagcctcctgggtagctggtattacaggcatgcaccaccacacccaattactttttgtatttttagtagagacggggtttcaccatgttggccaggctagtctcgaactcctgacctcgtgatctgcccgcctcagcagtgtcactgcttctagaccgttttcaaggcacagagcttagaaatgcatgttactaagaaatcaagagttaactatttttcaccttctttctcccgcagtgagaaccctggttctaccctgtttctccttgtgtaaattttaatgctaaactatacacttgtgaaataaaaatgataatgtcattcttaaattatggatcttgcagtgttatctaagtaacatagattgagtgatttaactttaggtttccttatttgtggaatttggataaatatttttcacccttgagaaaagtgagactcctttctcatcatcagagtatccttaaaccattaaggcaaacatttgggaaaaaactgagctatctggctgcataaaaattaagttttctttaacaaagatagaagacaaatgaaaacctagaaaaaccatttggttcaagtaacaggaagctatcttatatatgaattagagaaaagcaaacacacaaatagaaaaaaagggatggggggtactaaagatataaatagcttgtctaccaaaaaagaaataaaataaataacatgaacatataaaaagacacttacttcatgaatgtgatgcaagttcaaacaataaataacatttctgtactttcatattggctaaggttaaaatgataactgctaggaagggtatggagaagtgtgcgccttgcactgtagtgggagtatagaccctcagactttatggaggtcagtctggaaatatgtttcaaaatgtaaactacatgtcctttgaccaggtaattcaacttcttgaaatttatccaaggatttaattggataaatgtttaagatgtatatataagaatgtttactgcagtgttgtttatgattttaaaaaaatggaaatcatcttcatgtctaccaatagagaatgggtgaataaattatggtatgtccatatatacaaattacatagttgttggaaatattaggtagatttagatatactgatgttcaaaaatgtccattatgtaagtgaagctgggtcacagcaccttgtgttgagtatgatttcatctagaaacaaaattactccctcatcctttgttgtgttttagttttttaaaataagcttataccattgggctgggggaaaagtaaatactcgttttggagagagaaaagggcactaaagtttcagataccgttagattatttcatgcttatttttcaagcctcaataaattacataattcacatgtagtcttggattaaggaaattgctattaaggctaaataaataatatgagaggtatataatataaaatatgaacattatattggcattaagattggatccacggtcattccagcctctcattcttacctggacttcaagtgatcacttgtgggcaaatgccatctgacttgaacaggttacacatgtatgctcattatatcgttattttcaaaatttgtcatataaattttccttgagttcattcagatttttgaactagttttttctcttgggagtagtacacacttaattctctctagtactaagctaatgttcaccattcttataattttaagtatccagcatttagtaaagaagtctttgttttctttatccttacttttagtgaatgtcttagtttttaattgaaaattctgccatgaaaataagctctttaacatcttcactccctaatcaaaacagaaatccttcatagccttcagttgtagctatccttccctgtgatttgtccagctccattatatttattttgaaatatggtgaccagttttgcaaaattatttcaactgtaggtgcccagtgattttgtaaggagaagatactgtttctgaacagttctcagtagccagtggcctgcccctactttttggcctgcgtgtagtatataaaataatgcagttaactttttatagcacttttcattttataaagagattttcatggtctttaatattaatctatgtataaagtcctgtatgcagttttacctactttcacagctgaaggaacaatagcttagagaagatgtgagataaagtagtttgcccaagcccatagcacaaataagtgaagttcttcggctgtccatggatcgaagactcccaagtctatctctagcctggacttctgtcctgagcaccagacatgtatgtatatcaagatgcctgcaggtcatatccaccaggacaacccatgagtacagggaattcaacatgcccaatatcactcatcttttccttcgccctcccctttgtactcatcccctgtcggtaagctctgttattttaaaaaattgaaatgtattcacatagcatacaatttacacttttcaagtgtacatggtttttagtatattcacaagggttgtgcagtcattactactaattccagaatgttattatcaccccaaaagtcccacatccattagcagccactccccaatcccttctcccaccagcctctaaaaactgctaatttttccatctctgtggatttgtccactctgattatttcatataaagagaatcgtacagacgtggccttttgtgtctggcatcctccacacaggatgatattttcagagttcgtctatgtttttgcttgttgatcattccttcattcctttttctggctgaataatactctgttatatggatataccttattttgtttatctgttcatttgatgggcatttgagtgatttcctctttttggcaattttgaataatgccactataaacatttatgtacacgtttttgtgtgaccatatgttttcacttctctcgggtgtatatctaaggtacagttgctgggttatatggtagctctgtctttgactttttgaggaactgccaagtggttttggtagtgattgtactgtttacattcctaccaacaattttacctaagtatttctcaaatctatttaatcttttcggtccatactgctgttgctgccttagttcagattttgtcatttcttgtaataattcgtagctcatctcccagtctctgctcccctctctccctccctcccccttcttctctctcttatttccacccatttttaacatttatagaagtcaaaagtctagttcagaaagcagaaaccatactagatatttcagcacagagaactaattaggtgttggaagactgaaaggcaaaaaaacactgaagtaacacagtaacatcaagaatgggcactactcctaagattcagggaatgctgggaagatttggggtttatcagaactggaagctcagaggaggggccccttgtcgctgaggcttaatccctgcagaggtgcctttggctgctactggtgaatctgagtgggtatgatgagtcagtgtctgggaagggccaaaacattttgtccctttctataatttgtcatgataatgctagtaatgaatctgatctcccttcctattttaaaaaccttttagtgattttgtataggatgaagtttaaaactccttacttaatatacacatgaccctccgtaagctggcccctgcttgattgtccagtttcacttcttggtgcttattctaaggcctctaagccttagagatcctctaagcctttgagatccccaaaccctggactgcggactggtacccacctgtgtggcctgtgaggaactgggctgcacagccggaaggaggtgagcattacttgccttagctcctgtcagatcggcagcattagattctaataggagcgtgaaccgtgttgtgaactgcccatgcaaggatctaggttgcatactccttaggagaatctaactaatgcttgatggtctgaggtgaaacagtttcatcctgaaatcacccccaactcggtccttggaaaaattgtcttccacgaaactggtccctgatgccggaaaagttggggaccgctgttctaagctaaagttatatggagctccttggttctgtgtcctcaacatgctgttctatgttttttacattctgtttgctccttcctgcttggaatgtccttcccctccccgtctttcttaatgcatacaaagttgatctctcctgtgtgccaccattgtacttcgtcttgcatatggtgttacattcattttattttaattatttatttacgttcatgtctcttccactcaccttagttgcttgaggtcagaaactatataatgtgtgacacggaatgtgacacctagattttcaataagtgtttctatgatacaagggagactgatgtgggtagatgggaatgaactcatcaacctctgtttacataccctaaattccctgtttcttccctattataattctgacagtctacaaccgtctttgatggcttataaacggaaagtgcggaacacatcattctacagtgaatttaaataacctttcggaagagtaacgtaaagtacttgagcattaattgagtaaaagtttctcatcttttcctacaggtgttattaagcagtatgtaaaaagtccttacaatacttaatacattaagaaaacatacaatttcaagaggaaatccccgagtaatacattattgacattttcagcagttctagttatattgagaagagcatctcatggaattggcagaatgaagatggagattaaatgagatgatgtttgtaatatgcttatgacagtatctggcatataagtaagggctcagtaaatgttgactgctgtaattactattaatagtaatatgattacctttagtaaaagttattagtttctttaggttttttgtttactacaatatagtaaacaaaatctatacttggaatgtatatattgttttgttttgatacatggaatatgtctctgtgtcagagtcactgcctgagttggaaaacccatactcgagtatgttaaaaggtgaacacactgaataatttagttattaattataatggaaaaatgacaaacttgatgttctggttaatgaggttatcttatcttgaatgagttagcttttaaattcctcaaaataaaggcatttaataaaccaggaaacacttcattaaaaaaattatgcaagtcagtgtaaaagaagattaaaattccacatgggcaaaggacacacgttggcgataaatatgcagataagaaaaaaaacctatataacattattactcctcaaagaaattggtatgaaaacaataaaaatgtgtagcttatcaaaccaacaaaaatttaaaaatatgaaatccattttaagtaatgataaaatgggtgcactcttagtgctttatagaatagtagtataatgaacctcatgtgtgtaccaaccagctctttcatatcttaacatttagcaacatttgatttagctctttcttttttccaagatagaaaagttaatattgttgaagactcctgcattcttttccctagtcttattttcttccctcccataaatgtgttaaaatctctgtgtgtattgttttggttgtatttttacataaaactttacatattatataaaatttaattgaaggtaaaatttattaaattattcttaatatatattgtaatttaaaaattaacagcttcattgtcttgataaaatttatggtatcttaaacatgtgcttgtttttctaagagaacattgaaacatagattttaaaacaaattgttgaaagattaaaaaatctgcctttgcacactgttacattgaaagtggggcatttgtcgtgaacattcatttcaaatatgtagtatcttcagaatatttgagaaggatttgtattatataattgaaaaatctgttaaattgtatttatgttaactgcttaattctaataaaatttccattcattttttagtatctgcatatatttacatcaaatggattcattcacttatttaagaggcagtactaattacctatagcgttcaagactgttaggtagagggtgtgtagtggtgagtacaacaggcgtgagccctaccaacacggagtttaaagcctagtagaggatatagacttaaacaatttcacaagtaaatacataattacaaattataatacatgctatgaaggaaacataggaggtaccagagaaggaagagtgctttgcatttttatttttaagaccgaagagtgctattggaggactttgagcaagtgaatgacatgatctaacctaccttcgttcattcattcattcattcattttcttccttcctggctcaagcagtcctcccacctgagctccccaaatagctgggactacaggtacacactaccacacctaatttttttttgtattttttgtatttttgatgggattttaccatgttggccaggctggtcttgaactcttgacctcaggtgatccacctgtctcggcctcccaaggtgttgggattataggtgcctagcccatggtgcctagccctaacctacatttataaactatcacttgctgctgtgtggagactatattgtgagattaacagcagggatacctgctaggaagcaattgctgcagattgcctgagacaaaatagttatcatggactagggggatggtggtggtggtggtggtaggtggttggatgtaggatatattttgaagataggtaaatggtgcaagattatgggtcagttttaaatgcttaagtaaattttctttgtaagacattttaggatgccatgttaagaatctctttataactgtcatttaaaaaaaaaccacatattttcttagcataatttcccatagtaacattactatgtcaaaggctatgaacatttgaatgactttagataaatactgtaattgctttccaaaaatattgtgcttattatgtcaccagaaatgtttgaattctgtctacaattcagtcttgccagtatagtacatttcatttagaaaaattttttactatgtagatggaaaaaataatattttagctgggagtggggggactatggggaataactttccttcatttaatattttattgtgagttagtttaagttactttattttatcgtagtttcctaaggctacaaattagtaaccttggtaacttatgtacctaatttaaaagtttacttttttgaaaggctggaaatactaattaaaaacgtaacaccttcatccttgtctttgctccattattaactagtttcattacagaatctctgtgttttaaaatcagatgggttttcataaccagtactttctcagagtggtaaatttaaaaaaatatataaagagaataaataatatttgttgagaatacttcaaataatgtgaagagttattaacttacagcaggagttggcaaacttttctataaagggccatatgggtctttgtcacaaagtcttgggtttttgtttttgtttttttaaacagctatttaactattcctagctaatgggcaatacaaaaacagtgggcaagatttggcctgtgggcagtagcttgctgaaaccttatttagactctaaattttttgaaagagtctacattgatgcatatttttttttcttcctccaaatacagttgacccttgaacaacatgcgtttgagtgaccatgggtccacttgtgatacacgtttttttcccaaccaaatgcagatatggagggctgacttttcatatacctggatgttcctgggccaactgtaggactagaggctgggggggtcttggaaccaatgccgtgtgtataccagggatgactgtttcttatggcctgacctgaagttggaacagaatctttattaatatataatttttgttgcgtttgttttctctttatatttatccattctttttagatcgtatttcatttaacactttttcttctttagtttttaccaagttgcactgaaaatagctcagtgactaattgcacttctaagagtgaggaccctagttaaaattaactctaaaaatactgaatttttaacctaaaccttttatttctaatcaacagtattatttatgagtaggttatagattactttgaaacggaatgtgtctcagaactttgctatcgatatttttaaggtctggtagggaaaagataataggaatgagatttatcagtgaataggggactgctttcccagtttctcggtcgcactggtgtattcaccatggaagcatcttatgaaatatgtacataaactactaatatcccacattacaggttgactattctttatctgaaatgcttaggacctagaagtatttttggattttggtttttcagagtagggatactcagcctacattggtaagtaaagaatgtgaggtgacaggctgggcgcgatggttgacgcctgtaatcccagcactttgggaggccgaggcggatcacctgaggtcaggagttgaagaccagcctggccaatctgtactaaaaatacaaaaattagctggacacagtggcacgtgccagtagtcccagctactcaggaggctgaggtaggagaatcgcttgaacctgggaggcggaggttgcagtgactcgagatcgtgtcactgccctccagcctaggcaacagagcaagactccatctcaaaaaaaaaaaaaaaaaaaaaaaaaaagaatgtgaggtggcagcaataggtaggaagagtctttggtcagctttacatgctctgtagccatgcctgggtaatgggttgactctaagactctgtgctttgctcccacctcctgctttttcattactctttagaatggtttttaatttgtgatctataggagttctttcaagtatttaataagagaataggctaaattaagtaaatgtcaactgaatgctcaaatctctactaaagagcctcttatttagaaaataaatatccatcttttttttctgactggtgagataattaatttttattacagatggtttggaaaataccatatgctttaaaagataagcacaaaattatagtctaatatgtaggttttcatactttaaaaaattgaaaaccaaagaaaaacatttaacatagcatctagtacaaagaaaagagataagcaagagataaatgtcttttttgggacagagttttgctgttgttgcccaggctggagtgcaatggcacaatctcagctcaccgtaacctccacctcccgggttcaagtgattctcctgcctcagcctcccgagtagctgggattacagtcatgcaccaccaggcccaggtaattttgtatgtttagtagagatggggtttctccgtgttggtcaggctgatctcaaactcccgacctcaggtgatctgcccaccttggcctcccaaagtgctgggattacagacatgagccatcgcacccggccaagataaatgtcttttaaattatctccattaaagacataacctttataacattttgatgtatatattaccagtttttaaacacatagtagatttgtataaatacataaacacatattattgtgatcatgctgcacttagacatctttatattctccttatactgtaaacattttgaaatactttactaacaacatttgtaatgaccattctttctctctttctccctctgatagaatggtctacagagtaattcataaactaaacatactttagaggctgggcgcagtggctcatgcctgtaatcccagcactttgagaggctgaggcgtgcagatcacgaggtcaggagttagagaccagcctgactaacatggtgaaaccccatctctactaaaaaaacagtacaaaaattagccgggcgtggtggcgtgcacctagaatcccagctactcaagaggctgaggcaggagaatcactcgagcccaggaggcagaggttgtagtgagccgagattgcaccacagcactccagcctgggcgacagagcgagactccatctcaaaaaaaaaaaaaaaagatacattaatactatagcctacatgtggaacattaagaaaataattgcttttatgtttatgctttatacctgttgttagccctgcttcttatttcatgatttcatggcttcacattgtaacatccctttaccatattttttgaggactgttttggcagaatgtgtgaaatcttgagcagaagtattacccaaaagtcagaagaaaatcagatttttatttcaagattctgttaaagttacccactcccttcttttacttaatcttatagttgcagttctctctctttttagaaaagaaaaaagaggcccctcaggatttgcagatgaaacaatattgctctttagagatatccatctggctgttagattatttttccacagttttcagaagtggatgaggccattagaatcttgagtattgcccatttccttatgtgtgcctttgactatagataaaatagatgcatgacaattatttataagttgattgatttttcttgtcatttaaatcatcttgaataatagagttggtagagctatcccatttttgaaattattttgttttgtcaataactttttgttaccagcatgtacacttgcattgttgactctccatataatacctttaaaaaatttttttttgtggtaaaatatgcataacataaagtttaccatggtagttttctttcatttgttttgtttttgtttttttgagacggagccttgctctgttgccaggctggagtgcagtggagcgatcttggctcactgcaacctccgcctcccgggttcaagcaattcccctgcctcagcctcctgagtagctgggactacaggcgcccgccaccacgcccggctaatattttgtattttaatagagatggggtttcaccatgttggccaggatgttcttgatctcctgacctcatgatccgcccacctcggcctcccaaagtgttgggattgcaagtgtgagccaccgcgcctagaccatggtagttaattttaagtgttcaattcagtgaccttaagtgtgttcataatgttgtgcaaccatcaccatgttgtctaaccattagcactatctgttttgagaacttttttttatcatcccaaattagaattctgtacctgtcaaatagtccccagtaatcctccctcccccagcccctggtaatctgtagtctacttttcgtctttttgaatttgcctattttaggttcctcatataagtggaattatgtggtatttgtccttttgtgttggcttacttcatttagcataatgttttcaaggttcatctgtgttgtagcatgtatatacaggttgaagcatccgttatccaaaatggttgtgaccagaagtggtttggatttcagattttttttttggattttggaatattcatagatacttaactggttcagcatccctcgtccaaaaatccaaaatcagatggagctcagtggctcatgcttgtaatcccaacacgttgggtggccaaggcaggaggatcgcttgagcccaggagttcaaccagcctgagcaacacaagaccctatctctccaaaaaaaaaaaaaaaaaaaaaaagatgaaagaaaaaaaaatccaaaatcaaatgctccagtgagcatttccttttagcatcatgtcaggctctaaaagttacaggttttggagcattttggatttcagatttttggattaacctgcattaatgctcaacctatatgaaattttattcctttttatggctgaataatgttccactgtatgtatatactacattttgtttatccattcatctgttaacagacacttaagttatttccacattttgggtattataaatagtgctgctgcgaacattggtgtacatgtatctgtttgagtccctgtttttagttattttggttatatacctaggaatggaattgctgatcatatggtaattctgtgtttaactttttgaggaactaccactgttttccacaatggcatcaccattttacattcccaccagcaatgcacaaagatttcagtgtctgtatccttgctaacacttattttccattttttgagtttttttgttttgtttttttaataatagccaatcctaatgggtatgtggtagcatctcatggttttgattttattttcctgactattgatgatgttgagcatcttttcaggtgcttagtggccatttgtccgtcatctttggagcaggaacaatgtcttttcaagtcctttgcccatttttaaattgaattttttgttgttgagttgtatataacaccttttttgaagtaaaaggtgcactgtaataatccagactgtgtttctcccttctcaggattcctacaggaagcaagtagtaattgatggagaaacctgtctcttggatattctcgacacagcaggtcaagaggagtacagtgcaatgagggaccagtacatgaggactggggagggctttctttgtgtatttgccataaataatactaaatcatttgaagatattcaccattataggtgggtttaaattgaatataataagctgacattaaggagtaattatagtttttattttttgagtctttgctaatgccatgcatataatatttaataaaaatttttaaataatgtttatgaggtaggtaatatccctgttttataaatgaagttcttgggggattagagcagtggagtaacttgctccagactgcatcggtagtggtggtgctgggattgaaacctaggcctgtttgactccacagccttctgtactcttgactattctacaaaagcaagactttaaactttttagatacatcattaaaaaagaaaaccataaaaaagaatatgaaaagatgatttgagatggtgtcactttaacagtcttaaaagcaatcgtgtgtatagcatagaattgcttggattggataaacagtggcattatatattttaaaaaataaaagttttgaaagattgaagaatttgggcattacagttctcttaaatctgacaaagctgcataaaactattaaaataatcattattatactattttatattctatttctttgagggtttagttttccaaaaactacatattaagcaaatgaatcactcagtggctatgtcatataataacgagttagcctagttataagaagtttaacattttatttaagaacattgttacagcatgtttactgtatagtctagtaatagaggaaaagacatttgggtgggtggtagtggtagtatttttatagaggagttaccaaatttcagctctattatccaagtttacccagctaatggtgttcggaaccgggaatttgagccaattctgactctgttgtctgctctgctccttcttttgtgctgtgtctttgaaagtcacctaaaattgtgagggaatgtaatttcaccccaaatttagagtttatgcacttgttatattgaaaatgattaacatgtagaagggcttttaatggaataagtggtgtagtaacttcagtgttgcctacctagaaatcaaaatctttctagttgtccactttgttttttgaaaaagtaatatgaaaattatgttaatgctttaattcaggtttttgtaaaatattttttatctttacacatttaacatacgtttctaaaattatagtctgttatatagcactttgggtctagaatttttcagtagtttctgttttactattatgatctacctgcatattaacctattaggttatagttttactatacttctaggtatttgatcttttgagagagatacaaggtttctgtttaaaaaggtaaagaaacaaaataactagtagaagaaggaaggaaaatttggtgtagtggaaactaggaattacattgttttctttcagccaaattttatgacaaaagttgtggacaggttttgaaagatatttgtgttactaatgactgtgctataacttttttttctttcccagagaacaaattaaaagagttaaggactctgaagatgtacctatggtcctagtaggaaataaatgtgatttgccttctagaacagtagacacaaaacaggctcaggacttagcaagaagttatggaattccttttattgaaacatcagcaaagacaagacaggtaagtaacactgaaataaatacagatctgttttctgcaaaatcataactgttatgtcatttaatatatcagtttttctctcaattatgctatactaggaaataaaacaatatttagtaaatgtttttgtctcttgagagggcattgcttcttaatccagtgtccatggtactgcttttggctttggtttctttctacattgaaaatttctcttcaattctgagcacatgttaacatttagaattcaagaggtggggatttttttttcccatggttacatatatatatatatatatatatatatatatatatatatatatatatataaagaacagggcaacaaatttttgcgttttctatttcggtagtacttttaaaccattatgtcatgtttctaggttaaacgttgttgtatttgaagaattttactttggcagaatttttttgaggatgtgtttatttctggagaaaggtctcattaaagaaagacaatacccagaaagccaacagaaattctgttactcatttaatgcatttttctgacaaaaattattgccagagagaacctgaattttgtttcaaaaatcatctttgttttaaaaatgactttttcttcaggtaaaataaaataatttcagttgctattatttaacctgtttgtatgaagagtttaacatataggaaatgaatacataaagataggaaggaattaattgttatatgtagtcatatgtctcttaatgacagggatactttctaagaaatacattgttaggtgattttgtcattgtgcaaacatcatagaatatacttacacaaaccttggtagtataacctactatacacctgggatatgtagtatagtctcttgccccagggatacaaacctgtacagtatgtaactgtactaatgactataaggcaattgttaacacaatggtaagttttgtgtgtctaaacctacacttgggctaccctaagtttatatatttttttaaatttctgttcaataataaattaaccttactttactgtaactttttaaactttttaatttttcctaacattttgacttttgtaatacagcttaaaacacacattatacagctatacaaatttttctttccttatatctttattctgtaagcttttttccatatttaaaattttttgtttgtttttacttattaaacttttttgttaaaaactaagacatgcatgcacattaacctaggcctacacagggtcaggaccatcaatatcattgtcttccacttccacatcttgtcccactggaagatcttcaggggcagtaacacacgtggagctgtcatctcctataataacattgccttcttttggaatacctcctgaaggacctatccaaggctgtttatagttaacttttttttttttttttttttttttttagtaaataggaggagtacactataaaataacaatataggtgctataccattatacaactgacagtgcagtaggtttgtttacaccagcatcaccacaaacacgtgagcaatgtgtcgtactacagtgttaggatggctataacatcactaagcaataggaacttttaaactccattataatcttatgggaccactatcacatatgcaatctcctgtggaccaaaatgtcattatgtggtacatgactgtactaagaaattgatccatctatattccatcaatttgtttagggctttttctggttacatttacctgtgagcccagaaaaccagttttgtagaaattaacttctgtaatgctaggagttaaaaaaaattgctgaacaacttttacattgttaaacatttaaaaacaagcgttctagaagtttatcaaatttcataaaggtgcaaaaatgtaaatgtaaatcattatccagctaatatatatgttgtatttccctagtaggagagcatatgtacctcttcctagttatacaaatttgatatatagtaaagaaacagtaaattctacttcaagtcattttgggaggattaaaaactgaatttctctagtttgaccattgtacagatttatctggcaattttactaaaacctgatttataggttaaacttggtgtatatcatatatcactttactttagaggaattaagatttcacataaatccatttccaggttccaaagaccaggaagaggcttggtttttgtttttctttttactgtctttacagtctccttgacttttcttaggagagaaggtactgagaaaacatgattctaatatttattattttttcttccaacattttcttatgaaacattttcaaatacaaaattgagttttatttaaaacatttgcaaatatactacctagattctaccattgttgttttatatttgctttacttacaacttttaaaagatgctttttataccactgaacattttagcttacatttcacaaagaaaagaaaaaatttaagagactttgcataatgttttaaggggttgcagtaaagaagtgcttcttatattttcttatgcatacaaatcagctgggcttattaaaatccagattctaattcagaaggtttaggtggggaccgagtctgcatttctaacaaactcctaggtggtatttttcttggtacttggaccatactttgagtagaaaagcagtagaggacataaaaagagtcttgttagtcccactttgttgctgtccacttctcatttgataatatcctaaaatagctgtgtctcctttttggtggttgtatgattactacctcagaagtactaattgattcttgctatttgaccttaatactttaatataacacagcattcatatttgatcagaaaactatctggcttccttttataagagatttttaggttttatacagttttgtggccttgggtttttttgtttgatttgtttttttgaaggtatataatatgtaagtagataaacaaatttgatttgtagacatttttatgtggatcatctaattaaaaatggagggatacagtatgaaagaatacttgtacttcttaacagagcactcaacctttcttttacatcctgtttcactgatgttattatgtaatttatgttgctaaactataaattagatatttaatttctgttctttgatttccttttattattaaatggacttgttgatttgcctagaaattaatttgcctttcaaaagtcttattaatcttcctccgttgaaattaatttgatatttgcatgcttctggaagactttaaagagctattccgagtaactgtagagattataaaatgaaatatgggaattttaataaattttacatctccagttactggtgaaaatgtcaagtcctcctttctgcagagtattttgttactcatctgttattcagcttatttatttatttatttatttatttatttttctttctttcttgttttttttttttgagacggagtcttgctttgtcgcccaggctggagtacagtggtgggatcttggctcactgcaggctccgcctcccgggttcacaccattcttctgcctcagcctcccaagtagctgggactacaggcacccgccaccatgccttgctaaatttttgtatttttagtagagacgggtttcactgtgttagccaggatggtctcgatctcttgacctcgtgatccacctgcctcggcctcccaaagtgctgggattacaggcatgagccaccgcgcctggcccttatttgttttttaaacaaaattagtgtgcatatccttgttgtattttatcggcaagttgttttatgccctaacttttggggtcttgatcatgagcctaaaacacgtaaacacccaaaaagaattatattccggttaaaggaacaaaacattcatttagaagttctcatccatgtaaatcagaggctggcaaatattttctgtaaagggccaagatagtaaatgttttaggctttgagggccacaagtggtatctgttgcatttttttttaattatgaccctttaaaatgcaaaaatcgttgttagcttgtgcatagtataaaaataggctggccgcatgctgtggctcatgcctgtaatcccagaaatgaggtgggaagccgaggtgggcacaccacctgaggtcaggagttcgaggccagcctggccaacgtggttgaaaccccgtctctactaaaaatacaaaacttagccaggcgtggtggcgggtgcctgttatcctggctactcaaggggctgaggcagtagaattgcttgaacctgagaggcagaggctgtagtgagcccagatcaagccagtgcacaccagcctggacgaccgagcgagactctgtctcaaaaaaaaaaaaaaaaggctgtggctgcatttggtccattggctgtaatatgctgattcctaattctctgggtaactttagtgtttgattagctactagaagttaggttaaacttttgtattttacaggctaactttaataatcttaaagtaaaacttaacatagttcatggaaaggaaatagaaattttaccctagtactcttttttttttttttttttttttttgaggcagagtctccctctgtcacccaggctggagtgcagtggtgggatcttggctgattgcaacctcctcctcctgggttcaagcaattcttgtgcctcagcctcccgagcagctgggactacaggcacgcaccaccacacctgactgatttttgtatttttagtagagacagggtttcgccatgttggccaggctggtcttgaactcctggcatcaagtgatcctcccatctgagcctcccagtgtgctgggattacagacgtgagtcactgtgcctggtctctagtattttttttttttttgagacggtctcactgttgccaggctggagtgcagtggcgcgatcctggctcactgcaacctccgcttcccggattcaagcgattttcctgcctcagcctcctgagtagctgggactatgggtgcacaccaccacgcccagctaatttttgtatttttagtagagacggggtttcaccatgttggccaatatggtctcaatctcttgacctcgtgatctgcccgtctcggcctcccaaagtgctgggattacaggcgtgagccactgtgcccagctgtactttttaagataagaattgcagggtatatatttttaccaacttaataacttataattttaaaaagctaattacttggctagaatataatgcgttacatattctttacactcagttcagtccatatctgaaaggcaaatagaattattttctgctagtacattgtgtagtccctatgttcctagtgtataaggactgttacctagttcacatttatctgggttgttgacagattttcctggtccctttggacagtgcatggccatgttggcaaaagctgtcaaaattgaaacattgacaccatgagaattgtgtgttttccagtctgctaaaatcaaaagtgggagggttcagtaaggtgaataacagaagcagagttttcggggtatctgttactcctcattcggcttttctgctctctgggggtctcaatttaaatataatgtgaaaattagttttacgaacctaaaaatgttgagtgattcatttcctggttttgttgttaatttctagatatttaaattaattgttagaagaaccccgttaaagaatgctttgcaaaacaacctccttatgtgctatgtctctgtttaatagtagttgagtttgtgtacatgagatcaatattttgaactatagctttttatgagttaaaaattgacggaacagttactgtgcacttgctgtgcaccatggtagtctcccaagtagtggtttttctgcatttcaatagtacatgagataggctgtgggtggcaaggtttcttgagaaagtgagggatgcacagttgggttttagaatacatcttgttcctccatgcccttccccaccaaaaggctggtagtcttgcatttgtatatagttagggtatttgatgtgttgcttccttgacagagttttgcaagaatttgcagatttaacaggaacaaaaacttacttaaaacaaaatctcttagtaaaagcatagtctagcaagatttagaatgatactttggctaacagtactttctctatatggagtgctttgtttccatagcctcacaagtatgttttcagataatagttgagttgaaaatgttgtcaatctcttgattttaaaaaatttacatatttaaagttgtatacttttgttcctacgtattttcagttgttcttaaagtttaataagtgacatttgaaaatgagtatatgtgtataaaaacaaaagtaggctaggcacggtggctcatgcctataatcctagcactttgggaggctgaggcaggcggatcacaaggtcaggagtttgagaccagcctgggcaatatggtgaaacccccctctactaaaaatacaaaaattagctgggtgtggtggtgcatgcctgtagtcccagctactcaggaggctgaggcaggagaatcgcttgaacccggaggtggcggttgcagtgagccgagattgcaccactgcagtccagcctgggcggcagagcgagactccatctcaaaaaaaaaaaacaaaaaaagaaaaagttaaaaaaaaacaaaaaacccccacaaaatgagtatatgtggcaacaagtcctattctcaaaaaaattattgtgtgctagttaagagcttaatgagtagccagtcggtattaaatatctgtttcagctatattttatctttaaaaattatctacagattttggaatgtgaaaaactagtgttttgtttcataggtatatactgtaggcattttaaaaataagagccagtgccagtggtttacagtgtacacaaggataatgttctcatgttctcttgatgtcagtatgactttaaagcatattatcaagaaataactaagtctgaaaaactgtggtaaataactggtactctaaaacctaagtttcttattactaaaaataagaaatggtaaaagtcaccctgtgctgttaattatatgagccactgaggtcctgacactgaattcttggtggtggataataatctcttctttttaattattggcttccaattctctctgcattgctggaaacaaaaatcatatatttcactattggtggtggggatgctgtcactgaaaaagtagacacattcatattgattttagaaataagttaaaatcaaaatttgcttctgctaaattagtagaggaccaatactgtttttctccttcatagtatgttttggtacttctacattgacattataacttttttttttttaaacagaaatagaagtttacattcttagaa

SEQ ID NO: 36 - protein, 188 aa, Artificial Sequence [sequence omitted]

SEQ ID NO: 37 - DNA, 5306 bp, Artificial Sequence
  KRAS (WT) mRNA
ctaggcggcggccgcggcggcggaggcagcagcggcggcggcagtggcggcggcgaaggtggcggcggctcggccagtactcccggcccccgccatttcggactgggagcgagcgcggcgcaggcactgaaggcggcggcggggccagaggctcagcggctcccaggtgcgggagagaggcctgctgaaaatgactgaatataaacttgtggtagttggagctggtggcgtaggcaagagtgccttgacgatacagctaattcagaatcattttgtggacgaatatgatccaacaatagaggattcctacaggaagcaagtagtaattgatggagaaacctgtctcttggatattctcgacacagcaggtcaagaggagtacagtgcaatgagggaccagtacatgaggactggggagggctttctttgtgtatttgccataaataatactaaatcatttgaagatattcaccattatagagaacaaattaaaagagttaaggactctgaagatgtacctatggtcctagtaggaaataaatgtgatttgccttctagaacagtagacacaaaacaggctcaggacttagcaagaagttatggaattccttttattgaaacatcagcaaagacaagacagggtgttgatgatgccttctatacattagttcgagaaattcgaaaacataaagaaaagatgagcaaagatggtaaaaagaagaaaaagaagtcaaagacaaagtgtgtaattatgtaaatacaatttgtacttttttcttaaggcatactagtacaagtggtaatttttgtacattacactaaattattagcatttgttttagcattacctaatttttttcctgctccatgcagactgttagcttttaccttaaatgcttattttaaaatgacagtggaagtttttttttcctctaagtgccagtattcccagagttttggtttttgaactagcaatgcctgtgaaaaagaaactgaatacctaagatttctgtcttggggcttttggtgcatgcagttgattacttcttatttttcttaccaattgtgaatgttggtgtgaaacaaattaatgaagcttttgaatcatccctattctgtgttttatctagtcacataaatggattaattactaatttcagttgagaccttctaattggtttttactgaaacattgagggaacacaaatttatgggcttcctgatgatgattcttctaggcatcatgtcctatagtttgtcatccctgatgaatgtaaagttacactgttcacaaaggttttgtctcctttccactgctattagtcatggtcactctccccaaaatattatattttttctataaaaagaaaaaaatggaaaaaaattacaaggcaatggaaactattataaggccatttccttttcacattagataaattactataaagactcctaatagcttttcctgttaaggcagacccagtatgaaatggggattattatagcaaccattttggggctatatttacatgctactaaatttttataataattgaaaagattttaacaagtataaaaaattctcataggaattaaatgtagtctccctgtgtcagactgctctttcatagtataactttaaatcttttcttcaacttgagtctttgaagatagttttaattctgcttgtgacattaaaagattatttgggccagttatagcttattaggtgttgaagagaccaaggttgcaaggccaggccctgtgtgaacctttgagctttcatagagagtttcacagcatggactgtgtccccacggtcatccagtgttgtcatgcattggttagtcaaaatggggagggactagggcagtttggatagctcaacaagatacaatctcactctgtggtggtcctgctgacaaatcaagagcattgcttttgtttcttaagaaaacaaactcttttttaaaaattacttttaaatattaactcaaaagttgagattttggggtggtggtgtgccaagacattaattttttttttaaacaatgaagtgaaaaagttttacaatctctaggtttggctagttctcttaacactggttaaattaacattgcataaacacttttcaagtctgatccatatttaataatgctttaaaataaaaataaaaacaatccttttgataaatttaaaatgttacttattttaaaataaatgaagtgagatggcatggtgaggtgaaagtatcactggactaggaagaaggtgacttaggttctagataggtgtcttttaggactctgattttgaggacatcacttactatccatttcttcatgttaaaagaagtcatctcaaactcttagttttttttttttacaactatgtaatttatattccatttacataaggatacacttatttgtcaagctcagcacaatctgtaaatttttaacctatgttacaccatcttcagtgccagtcttgggcaaaattgtgcaagaggtgaagtttatatttgaatatccattctcgttttaggactcttcttccatattagtgtcatcttgcctccctaccttccacatgccccatgacttgatgcagttttaatacttgtaattcccctaaccataagatttactgctgctgtggatatctccatgaagttttcccactgagtcacatcagaaatgccctacatcttatttcctcagggctcaagagaatctgacagataccataaagggatttgacctaatcactaattttcaggtggtggctgatgctttgaacatctctttgctgcccaatccattagcgacagtaggatttttcaaacctggtatgaatagacagaaccctatccagtggaaggagaatttaataaagatagtgctgaaagaattccttaggtaatctataactaggactactcctggtaacagtaatacattccattgttttagtaaccagaaatcttcatgcaatgaaaaatactttaattcatgaagcttactttttttttttggtgtcagagtctcgctcttgtcacccaggctggaatgcagtggcgccatctcagctcactgcaacctccatctcccaggttcaagcgattctcgtgcctcggcctcctgagtagctgggattacaggcgtgtgccactacactcaactaatttttgtatttttaggagagacggggtttcaccctgttggccaggctggtctcgaactcctgacctcaagtgattcacccaccttggcctcataaacctgttttgcagaactcatttattcagcaaatatttattgagtgcctaccagatgccagtcaccacacaaggcactgggtatatggtatccccaaacaagagacataatcccggtccttaggtagtgctagtgtggtctgtaatatcttactaaggcctttggtatacgacccagagataacacgatgcgtattttagttttgcaaagaaggggtttggtctctgtgccagctctataattgttttgctacgattccactgaaactcttcgatcaagctactttatgtaaatcacttcattgttttaaaggaataaacttgattatattgtttttttatttggcataactgtgattcttttaggacaattactgtacacattaaggtgtatgtcagatattcatattgacccaaatgtgtaatattccagttttctctgcataagtaattaaaatatacttaaaaattaatagttttatctgggtacaaataaacaggtgcctgaactagttcacagacaaggaaacttctatgtaaaaatcactatgatttctgaattgctatgtgaaactacagatctttggaacactgtttaggtagggtgttaagacttacacagtacctcgtttctacacagagaaagaaatggccatacttcaggaactgcagtgcttatgaggggatatttaggcctcttgaatttttgatgtagatgggcatttttttaaggtagtggttaattacctttatgtgaactttgaatggtttaacaaaagatttgtttttgtagagattttaaagggggagaattctagaaataaatgttacctaattattacagccttaaagacaaaaatccttgttgaagtttttttaaaaaaagctaaattacatagacttaggcattaacatgtttgtggaagaatatagcagacgtatattgtatcatttgagtgaatgttcccaagtaggcattctaggctctatttaactgagtcacactgcataggaatttagaacctaacttttataggttatcaaaactgttgtcaccattgcacaattttgtcctaatatatacatagaaactttgtggggcatgttaagttacagtttgcacaagttcatctcatttgtattccattgattttttttttcttctaaacattttttcttcaaacagtatataactttttttaggggatttttttttagacagcaaaaactatctgaagatttccatttgtcaaaaagtaatgatttcttgataattgtgtagtaatgttttttagaacccagcagttaccttaaagctgaatttatatttagtaacttctgtgttaatactggatagcatgaattctgcattgagaaactgaatagctgtcataaaatgaaactttctttctaaagaaagatactcacatgagttcttgaagaatagtcataactagattaagatctgtgttttagtttaatagtttgaagtgcctgtttgggataatgataggtaatttagatgaatttaggggaaaaaaaagttatctgcagatatgttgagggcccatctctccccccacacccccacagagctaactgggttacagtgttttatccgaaagtttccaattccactgtcttgtgttttcatgttgaaaatacttttgcatttttcctttgagtgccaatttcttactagtactatttcttaatgtaacatgtttacctggaatgtattttaactatttttgtatagtgtaaactgaaacatgcacattttgtacattgtgctttcttttgtgggacatatgcagtgtgatccagttgttttccatcatttggttgcgctgacctaggaatgttggtcatatcaaacattaaaaatgaccactcttttaattgaaattaacttttaaatgtttataggagtatgtgctgtgaagtgatctaaaatttgtaatatttttgtcatgaactgtactactcctaattattgtaatgtaataaaaatagttacagtgac

SEQ ID NO: 38 - protein, 189 aa, Artificial Sequence [sequence omitted]

SEQ ID NO: 39-40 - skipped (2 entries)

SEQ ID NO: 41 - DNA, 75171 bp, Artificial Sequence
  STAT3 Genomic Sequence
ggtttccggagctgcggcggcgcagactgggagggggagccgggggttccgacgtcgcagccgagggaacaagccccaaccggatcctggacaggcaccccggcttggcgctgtctctccccctcggctcggagaggcccttcggcctgagggagcctcgccgcccgtccccggcacacgcgcagccccggcctctcggcctctgccggagaaacaggtgaagggggtgcagggtggggccgttggggaggcctggggacccgggggctccgcagcggcagggggcctctgggaccttggggatgttgtgatggacgctgcagtggggccgggagagatgaagagacgcggagggtcgccctgagggaagactcttcgggatgacaggagcgggcctcggaagggactcggggcgctggagggaagtttcgttcttcggagaaacagaacgcgctcgagggggcaccgtggggcgagggcgcactcggttgcggcggcaggagtgagggacagtcccccgatttcctgctccctggggccctggggacgttccggccaccggagcgactgtcacgccgacggggatcaccggcgcgagtggggggtcggaaagcgcctcctccccgcccggtcggcggctcccgctgagccacttcctccgcttgccctgttcccgctccttcaggagacagctgtgcccttttggaggcaggaataggtgtgtctgtcgcctgcagccttacgggctggctggtcgtgggtaggctttattgcataagaatcaagtttcctgtagggaaattgacagaccggtactctttctaaattccctcgcatctttttctaggttaaattatgctccccccacgtccccgccttgtaaaaaagagaaaaaaagacaaaataaaatccccatcaacccgtcaagccagctctagagagagaaataaacctcttgacattgtccttttccaaatacctggtaaagtcggccagaagataaataattgagccattgcatttactggattgtggtgttgcttaattgcataggacggaatgaaccaattgagagtgggagttttctgtctcagagccaagatcttgggtaaatgcagaggagagggaaacaaagacaggctggccttgaaaaaaccatgtgtgcaaactttacatgcatttggggggtgtggttgcactgaagttaacaagattcaaaccgtcgcccaagttggtatttccatgtttggtacacatcactctgtgccatatcaggtcgttgttaagtgtggtgacaaaatcagtggttagtcatttttttaattaaaaatgtgtatagtgtgtacctgctggtcttactgtatgtgcaactaaaggtttacatagtctgtgtatgggttgtaaatttttggctggctgtgctgataaagcattgggcttgaataaagcaaagcagaaaatcatctcaatcttttatatgtggatttagactgtgttatgacttggttcagccagttttctatcttattttatattaaatatgtctgtgttctctgagtcagcacatttatttccttattacatgttccagacaggagtgctagcccagtttttgttcagtttgcacagtgggatggggaaacaagtctggaatttaaaaaaaaatgttttagaggttggagccttgattttagtctctatattagcacatccatcacaaagaaccattagtaaattcatgaatcttttgttttttatgtagttcatttgagaagaataatcacttagaaatatccacagtgccaggcatggtggtgcacacctctgatcccagctaattgaaggctgaggtgggaggattccttgagtccaggagttgagtctggtctgggcaacatggtgagaggccaggaattgggtctagagtctagtctaagcaccataatgagaacccatctttaagaaagaaagaaaggaaaggaggaagaaaggaaagaaaaagaaatacccacagcacagttatgaattaacccacaaaggacttgtgaggtgggtagttcacataacaattaccctaatatcgtagataagaaaattgaggccaaaggatcaagacacttggccaacgcagcagagtgccatagtggtggaatttgtgcctccttctgtatattttgtgaaaagtatcagtgaaattctttttttttttttttttgagtcagagtcttgctctgttgcccaggctagagtgcagtggcgcaatcttggctcactgcaacctctgcctcctgggttcaagcgattctcctgcctcagcctcccaagtagctgggactacaggcgtgcgccaccacgcccagctaatttttgtatttttagtagagaccggggttttaccatattggccaggctggtcttgaactcctgaccttgtgatttgcccacctctatctcccaaagtgctgggattacaggtgtgagccaccgcgcccagtaagtatcagtgaaattctaacatatatctgaacagtaaaataccaccaataggctgaaagacttcatgggaggtaaatattcaataaacaggtgaaaaaagaaatacaaatggagcttgcttagattatttttctaattgctatgtctaacttgggaagtgaggaactgtttttggtcagcataatttaccatcagaatttagctatttactaatgaaaagaaatactaatctaggtttgttttagattaaggacagtcatgacctaaatgtcatttaaaccagagtgcattgtggcttgatcagtggtcatttctgtctctagaaagttgctttaacttctctgcctctacgtgtctcttgacattcagatatgaggtggggtagaggtggtgaccaactttccagacgcctgagtccaaaccttcttagcttatggttttcttaggtgatgtgcaaatcaacaaatatatacttttttttttttttttttgagttggagttgcactctatcacccaggctggagtgcagtggcatgatcgtggctcactgcaacctcctcctcccgggttcaagtgattctcgcacctcagcctcctgagtagctgggattacaggtgcccgccactacgcccggctaatttttgtatttttagtagagataaggtttcactatattgaccaggctggtctcaaactcctgacctcaagagatctgcccacctcagcctcccaaagtgctgggattacaggcgtgaaccaccttgcctggccaacatatatataccttttgcaactttgtcagagttgctatgaagaataagttgtatcttgttcacagaaattgcagtctactgggggagctgataaatgttttaaccatccaatgtaacatgttgtcatcaaagagatggtgagactttacacttgtgctaacaaggtagctgttctacataaaagaacatacagtacagatgtagaacttttctgttatcatagaacgttctattggacagtgctaggctgaatgctacagatcttcagagaaaggagaggttatgaggcctggagttgtctagaaagtctttttgccaaagagggatttcaactgggtcccaaataatgggtggaatttgataggtgtaaagaatttgcggtggtttatgcctgtaatcccagcactttgggaggctgaggcaggaggattgcttgagcccaggagtttgagaccagcttgggcaacgtggtaaaactccctctcccctaaaaataaaaaaaattagccaggcctggtggcgtggacctgtagtcccagctactggtgagactaaggtgggaggatcacccaagccccgggggttaaggctgcagtgagccgtgatcccgccaccgcactccagcctgggtgacagagtgagaccctgtctccaaaaaaaaaaaaaattcctggtagcccggtagactaggagggtaagtaggggagaagtgattacttacaaaagacattgaatacaggaccaaggaatttcagttctgttcttttgtaggggaagcttttaaaactttcggggcgccgggcgcggtggctcacgcctgtaatcccagcactttgggaggcccagacgcgcggatcacgaggccaggagatcgagaccatcctggctaacacggtgaaaccccatctctactaaaaatacaaaaaaaagtagccgggcgttgtggcgggcgtctgtagtcccagctactcgggaggctgaggcaggagaagagcgtgaactcgggaggcggagcttgcagtgagccgatatcgcaccactgcactccagcctgggcgacagagcgagactccgtctcaaaaaaaaaaaaaataaataaataaataaataaataaaactttggagccgaagcactgatgtttaatcatagagtgcttactatgtgttaggcacaggcctgattgcctgatgctggttaatttgtacaaagtaaatcagtgcatatgccctctgccctaggggagttattaactggagtctgacattgtacaaaggtaggtatcctgactagtttgatttggtactttgggtgaaaaaagtatagtgtgcttaagtgcagaagtgttttttgaggatttttgattggatacaaaccaccactcatattttatgtctttggcacttaaaaatttcaccataacttttgagtcatttataaaaaccactgaaagagtacttgagggacatccccgaatcctgaagaacttctggtgttctggagcagcctcagtgagatccaggaggatggcattgctgggctggcccagcccttattgattatggtgtaaagaattaatatggtggttatatactctttgttagacaccttggcttacaagacgtaagcgtaaagtgtagtgcgctttagtcagtatggccacatggtcctttggtggtaaattgtttgagatgcctccagtttttaaaaggagtagcatatcgggccaggagcagtggctcatgcctataatcccagcactttggaaggccgaggcaagaggattgcttgagcccaggagttcaagaccagcctgggcaacatagtgagaccactttgtttctttaaaaaaaaaaaaaaggcaaaaacaggctgggcatggtggctgatgcctgtaatcccagcgctttgtgaggcagaggtgagcggatcacttgaggtcaggagtttgagaccagcctggccaacatggtaaaaccccgtctctactaaaaatacaaaaattagccaggtgtggtggcacacgcctgtagttccagctactctggaggctgagccaggagaattgcttgaacctgggaggtggaggctgcagtgagccaagatcctgccactgcactccagactgggggacagagtgagacattctgacagtgctacactgaatgctacatgtcttcagaggaaggagaggttatgaggcctgggaataacatatggaagaatgaatttctgttatggtcagttctcatttgtcatgttaggattactgcaactcttacccagccgggtgtggtggctcatgcctgtaattccagcactttgggaggctgtgggcggatcacgaggtcaggagatcgagaccatcctggctaacacggtgaaactccgcctctactaaaaatacaaaaaattagcccagcgtggtggcagacgcctgtagtcccagctactcaggaggctgaggcaggagaatggcatgagtcctggaggcggagcttgcagtgagctgagatcgtgccactgcactccagcctgggcaacagagtgggactccatctcaaaaaaaaaagaaaaaaaaaaggattaccgcaactctttaattcagatcagcaaacatgttgagagccaggtattgcgtcaggcaggatccaaggataatgaaatattgtccgttttcatgaaactggagatgttgcagggaccgaggtgtgtgctatgccagtatggaagtaggacaggggagacgacagggcagtgagtggttcaagactctggctctgaagtcaaacagatctgggactgaatcctggatctgccacttcctagtcagaatctgagcctctattttcttatctgtaaaagaagattataacagtgcttatcttgtaggtactgttgacgattcaataagataatgtggataaaatgcttagcatagtgcctggcacatagtaagagctcggtaaatctaagttcttactaaatatccaagaaaagagattaattcttttcaggagtgagagaaagtcatcattattgaggggctttatcagatgggaacacctgaatagggttttataggatgaataggaattctttccacgaagttgcgttacaaaaagttgcattcaaggctgaaggaacatgagggtgcagaggcttaaaacagccttgtgtgttcagggagctataagtagaagttcttaatttaggagaactaaaccaaggggaaaggaggccaaggaaccacagttcttatcccttttctgttaataattgggtttaaatgtcattaaaataagttattttgtcctttttagaaaagtaataacatgctattataaaaaaaaagacttgtaggaatataaaatgtgtgttttacatgtatcctgttaattgacttgcttttattcagattttttgcagccctttctgtttaccaggttatcttggagacatatttattccaaattcctttttttttttttttttgagatggagtctcgctctgtcgcccaggctggagtgcagtggcgctatcttggctcattgcaagctccgcctcccgggttcacgccactctcctgcctcagcctcccgagtagctgggactacaggcgcccgccaccacgcccagctaatgtttttttttttatatttttagtagcgacagggtttcaccgtgttagccaggatggtctcaatctcctcacattgtgatccgcctgcctcggcctcccaaagtgctgggattacaggcgtgagccagcacgcctggccttccaaattccttttaacagcctagcaaaagaataataaggaaggtaaatctgcccctacaagaaaataatgcttcgacgatccggctttccttcctgctacccccagccataagaataaatgaccttgctcatcactgaaattttacctgacctttgaatttttaactgcgtcagccaaagaacttatattttgagtattcctaaggtgattgctattgtagttttgaaacacttggttggtatgtttgagggtttcatggtccaaagttactatagcagttaaaagagtggactatcaggtcagacctattgggctttaatcccagttctgccttctcttagaccttgggcctgttgttttcacttctctggttttcagtttctctgtccacaattgtggaaacgaggtccacttgtagagtaattgagaggatgaagcaagatgatgcatatcaagtactttgcatagtgccgggcagacaggtaacattcaagtgctaataattactattattactatttattttttgagacaggttctcactctgtcacctaggctggagtgcagcggtgagatcacagctcatgacagccttgacctcctaggctcaagtgatcctcctgcctcagccttcggggtagctggggctacaggtgtgtgctaccaccctcagctaattttctaatttttttgagtcaggatctcgtcacgttgcctaggctgaattactcttattaaaaactataatatcaggccgagtgcggtggctcacgcctgtaatcccagcactttgggaggccaaggcgggtggatcacctgaggtcaggagttcaagaccagcctgcccaacagagtgagaccccccccgtctctactaaaaatataaaaattagccagttgtggtggtgggcacctgtaatcccagctactcgggaggctgaggcaggataatcgcttgaacccgggaggcggaggttgcggtgaaccgagatcgtgccactgcactacagcctgggtgacagagtgagactctgtctcaaaaaaaccgaaaaacaaaaagcataattagggtggtaacgcttatacataggggcaggtggaataaaacataattaggaggtcgggcatggtggctcacgcctgtaattccagcactttgggaggccgaggcgggtcaggagttcaagaccagcctgcccaacatagtgagaccccgtctctactaaaaatataaaatttagcctgttgtggtggcgggtgcctgtagtcccagctacccgggaggctgaggcaggagaattgcttttgaacccaggaggtgggggttgcagtgagctgagatcgcgccgctgcactccagcctgggagacagagcaagactccgtcacaaaaacaaaaaacaaaaaactgtcatatcaaaaactaaactaaaatggtaatatctgttagatattacaaagtcaggcaaattatgattcatggcagccactaatgacccaaaggagagaaagaataattagcagattctaacctaatgggaaaaaaactaaatgaatagggatgggggacttacattctgttagaggaaattgaggctgtcatataaaaggaataggtaaggcaaactgtaaattcctgtttacacaaatgcccttctgataaatctctgcattgcccacagtccatgattacctctcccttattttaagtaatatttaacacattaaaaatggattaccacccaaggaattgctcccgacccagaaagtgcaggtagtgttgaaggtttgaggggaagaggaatgattagagttggttgtgtctcaggaagaagccaacaggaggaaccttattttgagtcaggtaaagaaggtgggagtgaggaggcatcccggtggccaggtatgaagctgggagctgattgctgcacattactcagctgaattaaatgtgccctcacatctgtgtgtgtgcgtacatgcaaatgtacatgtgtatgagttagttggaggggtagacctttattttcctgtcctgtaactttcctttgcaaactaatctgtattcagaacagtgttgcagttaagaaccacccagcttgtccatgaaacaggttctctcaccccatctccccagttttagagaaggcaggaaagaaaaggcagtgcttttcttttttcctggccgtatgcggggcaggaagaagccagcagagcttgaaagagaaagtaaaccttctgggaaataaacggcttggcttccctattgtggaggaggagtgcaaattattagggggatgtttgggtagtttttgtagaagccatttctgaaaactgatttggattagtgaaggtaagcccaatttaggaaaaccctgcccagtctggtgtcagccacctgtttcccgctttgtttgattgatttgattagtttgtggtattctgacctctcatttttattacaagagttggaagatttgagtctgaacttgagcacctgcttcggtgaaagcttcctaaaatgcatgttttttcacattttttctcatgttcattttgttttgctttttagcaaacactttttctgacagaatctaaaagcattagacttttcttgttttccccttctctccccacaatgtaatcttgaaaacccaaatgttagctgtgtaaattacctctcccgtaaaccaaacaaagtgcaatattgcattgagttagcattgaaatagtcggcctttgaatttttttctacttgtggtttagacataataaatatttcatctcagactgactttctcgacaaatcagttttgcatttgggcctcttttcatcagtatgtttagggaaagcacatttattgaaacattaaccaaaatgaaacataattaggaggccgggagcgatggctcacgcctgtaatcccagcactttgggagaccaaggcatgtggattgcttgaggtcaggagttcaagaccatccttgccgacttggtgaaatcctgtttctactgaaaatacaaaaaactagctgggtgtggtgacgcgtgcctgtaatcccagctactctggaggctaaagcaagagaatcgcttgaacctgggaggcagaggttgcagtgagtcgagatcgtgccactgcactccagcctgggcaacagagactccgtctcaaacaaccaaaaaaacaaaaacaagcataattagggtggtaacgcttatacataggggcaggtggaataattgaagcattctggagccagaaataatcaactgattaagaataatctggctgggtgcggtggctcacgcctgtaatcccagctactcaggaggctgaggcaggagaatcgcttgaacctgggaggtggaggttgcagtgagccgagatcgcgccattgcactccagcctgggctatggagcaagactccatctcaaaaaaaaaaaaaaaaaaaatcctgtttctgcagaaatatcccaggtgtcctgggtcagcagtgccccatagattccacggacgtttaccctaagttttccaatgggagttcatacctctatacccagtgagaatattttctgagtaatgggaatgagattggagatgtagggtagagaagatccatacagtctttgggttaaactttttcctctttgcctaggaaagattaatgctaatcttaaccacagatttgtagtaagaatgtatcagttttgtcattcagttctagactccagttttctttattgtaataccaatattttagagtaaattttgaaatgaatcagtacaaaagatatgtagtaagtggaaagttagtccgcaccttatccttgggactctttcccagggacagctagttacctactatttatctctcctgagttacttcatatgtatgcatgcaaacatgttattctctgggtgttgttccttccatatatagcagcaaatacaccaaactctgtattttgctttttgtcactttatcttagagaatactcaatgcaaatacatgtgtatatacctcatgtttaaaaaatctacatagtaaaattagccaggcatggtagtgtgtgcctgtaatcccagctactcgggaggctgtggtgggagaatcacttgaaccctgagatcacaccactggactccagcctgggccacagagcaagattctgtctcaaaaaacaaaaacaaaaacaaaaaaactacagagtagtattctaggctatgcatatcataaatttgatttcctaatgataggcatagatgatttgcctgggcggcaaattagcgttggctgtgtctcaggaagaagccaacaggaggaaccttattttgagtcaggttccaaagacagaaacattgtctgacatttgtttttgggcttatatgaataaatctgtacacatatatttttaatgttttaatcgtaatatgtatactatttggaaatgtggctttttagttaacagagtgcatgttttaccccattgcacttaaacattaacttggggataattaaatgagtctgtcacttggacaggcaggaattgtaccccccacaaacccataaaccgccaattttttttttttgagacagagcctcattctgttgcccaggctggagtgcagtggtgcgatctgggcccactgtaagctcagcctcccgggttcatgccattctcctgcctcagcctcccaagtagctgggactacaggcgcccgtcacaatgcccggctaattttttgtatttttagtagagtcggggtttcaccatgttagccaggatggtctctatctcctgaccttgtgatccgcccgctttggcctcccaaagtgctggaattacaggtgtgagccaccgcacctggccggtttttttttttttttttgagatggagtcttgctctgttgccaggctggagtgcaatggcatgatctccgctcactgcaacctccacctcccgggttcaagtgattctcctgcctcagcctcctgagtagctgggactacaggcgtgtgccaccacgcacagctaatttttgtaattttagtagagatggggtttcattaataatcattaatattagacaactgtcagactcacagtggtggatacaaactttctcaaattctgatttttactctaaagctcaaattttatcattggcaacaaatattgtcagttgctttccctgaacagacagcttcccttctttcatttttgagaaaatatctgccagtatcccagttggtttatcaatcattctttctctttttttttttgagacggagtctcactctgtcacccaggctggagtgcagtggcatgatctcggctcactgcaacctccacctcccaggttccagcaattctcctgcctcagcctcccgagtagctgggattacaggggctagcagccacacctggctaatttttgcatttttagtagagacagggttttaccatgttggccaggctgatcttgaactcctgacctcatgatatgcccaccttggcctcccaaagtgctgggattacaggtgtgagccattgcgcccggctctattatttcttttctttctttctttttcttttttttttttgagatggagtttcgctcttgttgcccaggctggagtgcaatggcgcgatctcggctcaccacaacctccgcctcccgaattcaagtgattctcttgcctaagcctcccgagtagctgggattacaggcatgtgccaccacacccgtctagttttgtatttttattagagatgggggtttctccatgttggtcaggctggtctcgaactcccaacctcaggagatctgcctgcctcagcctcccaaagtactgggattacagttttgagccacctgacccggtttgcttattatttcttttaaatttaaaaaataataaataaaggggccatgagagcgaagagtttgagaaaggttggtctaaaggttttaacataagaatccctgggttatttgcttaaaaagaagaaagaatctatggatctgcctgagagggtctgatgtagtttatctggggtcatcctcacaggcatagcagatattctgattcagatggtccttggtccttagtttgagaaatgtggctttacaaggcccatagaatataaagtcttctttggattagtgaagtcatgtccacagggtttagaaaatgtttttgttttagagataaaggtaagtggaagagtagacatgtagtgaatgagggaaaatgttttagagatttctttttattctgtttactcttcttggtatgcacgtacctgaatattaaggatattttatgaagtcatgacattaccagattaatgttggttttgttttaaggtactttctgactgctggggttaattcctacagacgattctggtaaagaatagcctttaagttttaaaagtgttgacttatttcagatgtcttaataaagttaacttccagttattacatgtaacgtatataaagctctcattttcctttattctcgttaattgtttgcataacaaattcaaagggaaatttgcttggcagagatcagatagcagagatgagatttaaaaacaggtaatttggctactagcctgggagtttgaagattccaagtttgcatccatgtgtagtcacttaacatttctgtccttatctgtaaatgggaataacacctacttgatagggttgttacattatcttggccacctcaggttctctttggctgagtgattgactggaaaacgcaatgtgaattcatgcttcagactgggttcttttttttttttttttttgagatggagtttcactcttattgcccaggctggagtgcaatggcacgatctcagctcactgcaacctctgcctcccaggttcaagcgattctcctgcctcaggctcccgagtagctgggattacaggcatgcaccaccatgcctggctaatttttttgtatttttagtagagacggggtttcactgtgttggtcagactggtttcaaactcctgacctcaggtgatccacctgcttcagtctcccaaagtgctgggattacaggcatgagccaccgcacccagcccaggctaggttctatatgggtgtgctttttagaatttagatcatgggctatccccaacacaaactggataatgtttctttctagattctctctaagcgtgtattctctttctttcctaggcacagccaccacttcacttacattgtgggattataatttcatgagtagtggaatttccttaaccttctcttgtgtgggagctgaaggacaaaatgagatattctctgaagagtggttacatcatgcaaaactatgatgtgtaatgaggtcacttagttttctaagtacattatacattttgataagattttcatagaaaagcttgtctccttggggagatcactcatcttccatcttgactattatttaaactttatgggtcagatttatctttttaaaaacttaaccataaagctcaattaattttttttttttttttttgagacggagtctcgctctgttgcccaggctggagtgtagtggcgcgatctcggctcactgcaagctctgcctcccaggttcatgccattctcctgcctcagcctcctgactagatgggactacaggcgcccgccacgatgcccggctaattttttgtatttttagtagagacggggtttcaccgtgttaggatggtctcgatctcctgacctcgtgatccacccgcctcggcctcccaaagtgctgggattacaagcgtgagccaccgcgcccggctcaattaatatattttaaaaattaatagactttattatttttattttattttatttttgaggcagagtctcgctctgtcacccaggctgagtgcagtggtgtgatcttggctcactgcaaactccacctcccgggctcaagtgattctcctgcctcagcctcctaagtagctaggattacaggtgcctgccaccatacccggctagtttttgtaattttagtagatacgtgttttctttcttttcttttcttttttttgagatggagtttcactctttttgcccaggctggagtgcaatggcatgatctcggctcactgcaacctccgcctcccaggttcaagtgattctcctgcctcagcctcccaagtagctgagattatagttgtctgccaccacgcctggctaattttttgtatgtttgatagagacagggtttcactatgttagccaggatgtctcgatctcttgacctcgtgatccgcctgccttggcctcccaaagtgctgggattacaggcgtgagccactgcggccagtctagactttattttttaaagcagtgttagttttacagaaaaattatgtggaaagtacagagagtttccatataccccttactttctcccacaacttctattattaacatcttgcattagtatagtacgtcccttacaactaatgaaccaactcgatacattattattaaccaaattcctgagtttattttatttctatttttattttattattattattttttagaggtagggtctcactgtgttgtccaggccaggttgcagtggcatcatcatagcttgctatagcctgaaactcctgggctcaagcaatcctcctgcctcagtctcccaaagtgttggaattacaggtgtgagccactctgtccagcctgaagtccatagtttacattacatttcactctgttgagcattctatggattttgacaaatgtgtgatgatgtatatttgccagtacacaattatataaaatagttttactgccctagaaaccccctgtgctccacctattcattcctctgctgaaccactggcaaccactgatcttttataatatctccatagttttgtcttttccagaatgtcatatagttggacatacagtgtgtagccttttcagattggcttctttcagtaaatgatatgcatttcaggtttcttcatgtttttttgtggcttgataggttgtttcttttcattggtgagtaatactctattgtatggatataccacatgttgtttatcaaacattcacctgaaggatagacatcttggttgcttccaagtttgagcagttatgaataaagctgctataaacattccagtgcaggacttttcacctcctctggataaatatcaaggagtgcaattgctagatcatatggtaagagtatgtttagttttgtaagaagctatcaaactatattcaaagtgactgtaccattatacattcccatcagcagtgagtgagagttcctgttactccacatcttcaccagcatttagtggtgtcagtgttttggattttagccattttaatgggtgtataatggtatacctattaaaattggttttttttggagacagagtttcacagtttcactcttgttgccctggctggagtgcaatggcgcaatctcggctcactgcagcctccgcctcccagtttcaagtgattctcctgcctcagcctcccaagtagctgggattacaggtgcacgccaccatgttctgctaatttttttgtattttagtagagatggggtttcactgtgttacccaggctggtcttgaactcctgagctcaggtaatccacctgcctcagcttcccaaagtgttaggattacaggcatgagccaccgcacctggcctcaatttttttttttttttttttgagacagagttttgctcctgttgaccaggctggagtgcagtggcacaatctcggctcactgcaacctccgcctcctgagttcaagcgattctcctgccacagcctcctgagtagctgggattataggcgcccgccactacgcctggctaattttttttttttttttaattagagacgaggtttctccatgttggtcaggctggtcttgaactccccgttctcaggtgatccgcctgcctcagcctcccaaagtgctgagattacaggtgtgagccaccgtgccccgcctgttttggcttttactgtgaagacgtgttagccgctgtgatgactagcaagtgtggccctccacccagtcgctctgggctcccagctcctgcatcctgctgcaaacttgacatcttccctcaagtaacttgtagttgtctcctgtctacttgcccaaaatataactcttaaacttttctctctgcaagtttgtgcctctctccctgtctgacttccccatctaaataaatggtagaccaccatctactcctttgtgcaagccagaaatctaggaatcatccttaaattccctgttctgtcttatctctgctttcattcaaagcatcagcaaatcctgttggttctacctctgaagttttctcaaatactgttacttgactcatcctgacttttgtttctgctttatgttaggctaaatgccctgaaaactcttttgtacaaaacacctagaaatactggataaactgggcttaacagggaggcccggtgtggtggctcacgcctgtaatcccagaactttgggaggccaaggtgggtggatcacctgaggtcaggagttccagaccagcctggccaatacgtagtgaaaccccacctctactaaaaaaaaaaaaaaaaattagctgggtgttgtggtgcacacctgtaggtggtgcatgcttgaacttgggaggcggaggttgcagcgagctgagatcgcgccactgcacttcagcctgggtgacagagcaggattctgtctcttaaaaaaaaaaacaaaaaaagaaaaacaggaaaatcttcagaagcaaaaaccaaacaatctcaccaaagaaatgagaagatggctgggcgcggtggctcacgcctgtaatcccagcactttgggaggccgaggcgggcagatcacccgagatgggcagatcacccgaggtcaggaattcgagaccagcctggccaatatggtgaaaccccgtctctgctaaaaatacaaaaattagccaggtgtggtggcaggcgcctgtaatcccagctactcaggaggctgaggcaggagaatcgcttgaacctgggaggcggaggttgcagtgagccgagatcatgccactgtactctagcctggacgacagagcaagactctgtctcaaaaaaaaaaaaggctgggtgtggtggctcatgcctataatcctagcactttgggaggccaaggtgggcggatcacttgaggccaggtgaacatggcgaaaccccatctctactaaaaatactaaagttagctgggcatggtggtgggtgcctgtaatcccagctactcgggaggcgaggcaggagaatcgcttgaaccaggaggtggaggttacagtgaaccgagatctcgccaccgcactctagtctgggcgacagagcaagactccgtctcaaaaaacaacaacaaaaaaccaacacatggccaaagtgcagtgacttacatctgtataatcccaatgttttgggaggctgaggcaggaggatcgcttgagtccaggaatttgagaccagcctgggcaacatagacctcatcaccaaaaaaaaaatattttttaattagctgggtttggcagcatgtacctgtagtcctagctactcaggaggctgaggtgggaggatcacttaggcccaggagtttgatagttcgaggttatagtgagctatgatcctgccactgcactccagcctgggccacagagtgagaccctgtctcttagaaacaaaacaaaacaaaaaaaagaaactgaattaaaaacaacaagaacaaaaatgctgctttttgttattgagttgtagcccaagtttcttgagggtaaagcattgaaaagcaggcagtaatagatttgctgtttaaagagatttacttgcagcactattcacaatagcaaagacatggaatcaacctaaatgcccatcagtgacaaattggataaagaaaatgtggtacatacactgtggaatactatgcagccataaaaaacaacgagatcatgtttttgtttgtttgtttgtttgtttgtttttgagatggagtcttgctctattgcccaggctggaatgcaggtggcacgatttcagctcactgcaacctccgcctcccaggttcaagcaattctctgcctcagcctcccgagtagctgggattacaggtgccctccaccatgcctggctaatttttgtatttctagtagagatggggtttcaccgtgttgggcaggctgttcttgaactcctgacctcatgatcctcccacctcggcctcccaaagtgccgggattacgtgtgagccaccgtgctcggctgagatcatgtttttgcaggaacatggatggagctggaggctattatccttagcaaagtaatgcaggaacagaaaaccgaagaccacgtgttctcacttataagtgggagctaaatgataaggacttgtgaacacaaagaaggaaaccacagatactggggtttacttgagggtggagagtgggaggagggagaggaacagaaaagataactattgggtattgggcttaatacttaatattttatcaaaataagctgtacaacaaacccctctgacatgagtttacctatataacaaacttgcacgtgtaaccccaaacctaaaataaaagttaaaaaaaaaaaaaaaggctggttgcattgggaggctgaggcaggcagagcacttgaggccaggaattcgagaccagcttggctaacgtggagaaaccctgtctctactaaaaattcaaaaattagccaggtgtggtggtgcatgcctgcagtcccagctaccagggaggctgaggcaggagaattgcttgaactcaggaggcagaggttgcagtgagctgagattgcaccactgcattccagcctgggcgacagggcgagaccttgtctcaaaaaacaaaacaaaacaaaacaaaaacctgtcactttgggaatatctcaaacctagtcatccaagtggttgtacgattttagtgtctgcatatcaatatttagtgtgatctactttcttagattctcaaatactgccaatgggcacatgtcatgaaataatgtcttttagaggacaagagagtgctaaagtctcattattgcagtttaagaaaaacaattctgtaacagtttaactttataggaaatgccttttgtttatttattttttttcttttgaggcttagatttttatttttatgtttttagagatggggtcttcctatgttacccaggctggccttgaattcctgggctcaagtgatcttcctgcttcagcctcctgagtagctgggactagacgtccactactgctcctggctggaagtttagattttaatttaaactcttctattgggaaactttgtatgtttgctttaccacttaacatttgcatgcattattgtacctattgtctcctacttaaggaagggcagtttatgctgttatatgaagtgaattaacctcctatggtacttcagttttctctatgctaaaagtgtgttctagatttttgaaaaacttacttaattttcattcatttattcaaatatttgagcattctgtagttgctggggaaatagcagtgaactgaagaatgtctttgttcttatggggcttaagttcctagttgatcatattggaaggagatacatgaaaaaagaaatatatgaacaatggagggcgatgagtactgtaaaggagaattcagcaggggagatgttgctgttttagatagaggggtgtcaagagacattgtgcagagacctgaacgaagtgagggagcaagccatggagatatctagggaaagagcctatcaggtggagagaagagtcctagggcagaaacgggcaaggtgtgttccaggagcagagaggggacagctgtgagcaaggggagagttgtagggaaggaggcaaagagagacatctggggcaaaatggattgactggtgggccgtggtaggactttggattttttcctgagtgggttttgagcaggggaatgaaatgatctgactctggttttttttttttttggagacaaaatcttgctctgttgccgaggctgaagtgcagtggcgcaatctcggctcattgcaacatctacttcctgggttcaagctatgctcctgcctcagcctcccgagtagctaggattacaggcttgggccaccatgccggcgaatttctgtttttatttttattttttatttatttttatgtttatgttttttgagacggagtctcgctgtgtcacccaggctggagtgcagtggcgcgatctcagctcactgcaacctctgcctccccggttcaagcaacttctcctgcctcagcctcccgagtagctgagattacaggcgcctgccactacacctggctaatttttgtatttttagtagaaacgggatttcaccttgttggccaggctggtctcgaactcctgaccttaatttatctgctcgccttggcctcccaaagtgctgggatgacaggtttgagccaccgtgccagccaggactcttattttgaaaggatctgtaatgtggagaatagaaggtagagggacaaggatgaaagcatccaggccagttagcctagtccagctatctaggtaagagatgctggtggcctggattaaggctgcgtcagtgggaggttgtgagaaaggctcaccttccttttttttttttttttttttttttgagacaggatcttactctgtctcccaggctggagtgcagtggtgcaatctcagcttactacaacctccgcctcctgggctcaagtgatacccccacctcagcctcccaagtagctgggatcacaggcttgcgccactatatccggctaatttttgtatatttcgtagagacagggttttgccatgttgcctaggctggtctcaaactcctgagctcaagtgatccacccgcctcagcctcctaaagtgctgggattataggcctgagccattgtgcccggtcacttccagattttgaagacagagccaacaggatttgttaatggattaggtgtggcaggaggagggggaggaagagagagagagactggagttgaagttaaggctcatttcaaggtttttagcctcaacatgtgcaggaatggagttgtcacttgctagaatgggggagactggaggagaagccggctgggagaggtttttaatgaaggggttggctttggatacattaagtttgacatgcattttagacatccaggtggagatattgaagaggcagttggctataagtgtctgatgttcatattagcggatggggctagagacataaatttgagaattgtcagtgtataaacgttgttttgaaagaaagtggggctgaataatttagaaaggagtgcatagagaaaataagtttactattaaaatagctttaacaggccgggcacggtggctcatgcctgtaatcccagcactttgggaggctggggtgggcagatcaaaaggtcaggagtttgagaccagcctggccaatatggtgaaaccctgtctctactgaaaatacaaaaattagccaggcgttgtaccgggcacctgtagtcccagctacttgggaggttgaggcaggagaatcacttcaacccgggaggtggaggttgcagtgagccaagatcacgccactgcactccatcctgggcaacagagcaagactccgtctcaaaaaaaaaaacaaaaaaaaacaaaaaaaaaaaactttaacagcaaagcctcttcctttaaaattatgaatttttttcttatggaagttggactctttcattattaagtctacattcaatcactatgttagtaaaaatgttgttctagttgccgaatgcaataaaccagctcagacttagtggcctaaagcagcaatcatttgactatgttcgaagatgccgtgggcaggaatttagataacagcagggatggcttgtctttgctctgcgatgtctgaggtctcactgagaaaactcaagcggctgggggtaataatcatctggaattttctttactcctgtatctgatgtctgggctgcgatgactcaaaggctgatttcagctgagactgtagaccacgtgcctacttgtggcctccccttttgccttgggtttctcacagaatgtggctggttctggagaatgagacttccaatgaaatcaggtggaaatgacatctcgccgctttcagcatgctctattggttggaacagttatggacttagctagattcaaaggaagggaacaaagaccccctcctctcagagagtggggcataatgagagaatttagggccatgttatccaaccaccacaaatgccttctgaatttgaggttctgcctcaaaagttcatagttcctttgactgaaggacttctatatatccaagcatcgtcagccccaggtatattgttccatgtaagtgaccaggactaccttagtatttcgtatagggaaagtgacctgaataaatttgagaaaagaatcttccttctctccagtaagcactgaggtaagcattgagccatattataggtttatgactttgagactcagaaatttaaattcttggccaggcgcagtggctcacgcctgtaaccccaacactttgggaggccaaggcaggcagatcacttgaggtcaggagtttgagaccaacctggccaaaatggtgaaactccatctctacgaaaaatacaaaaattagccaggtgtggtggcgggcacctgtaatcccagctacttgggaggctgaggtaagagaatggcttaagttctctttatctgctttatttcagttgcctctcttagatgaatattaatgacttacatagcattttagatcagtggatgtttttgtgattcttttatttgagctttggccaaagataacagtacccacaggttttttccagctactcgctcttctcccttcagtggccctcgagcctggaaaatctgacatgacaatgtgcttgctcaacctaccactgtttttcttttgaaaagtttggcagcctgtttctgactcctatgaaggtgaattcctcagcattcacagtttattagaaaaatactttgcttctctccaaactcgaaattcaagataaccaaacctatatataggctgatctttcaggatgcagttgtcatgttgatgccatgcttttcagtatcgtggccatcatctgttcagtaggggaggtgtacttctgtaatgggaggtggtggttatgtgtgtgtgcaagtgtttatttggtgtcttaagttagcctgtgggaagttctaaatcaggatggtacgtggttgccagcagagagctgctcctcaagtgaaggaggtagaatcaaagccaataggaaagagcctcagatgcttatatatgtaccgtggggattcagagtgaaagcagtcattggactaggggtggggttagggagagcctgtctgacagacacaagaaagggatggataacgccacccagagaaaaaagcattttaggcaagaacaaatatgaaaaaggaacaaagtctgtgggtggggggcaaggaggagataagttgacttgaaggaagacaacacttatgaaagtcacctggaggctgggtgccatggctcatgcctataatcgcagcactttgggaggccgaggtaggaggacaacttgagcccaggagttcgagaccatcctgggcaacatggtgagactgagtctctaccaaaaaaaaaaaaaaaagaaaattatccagacatggtggcatgtgcctgtaatcccagttactcaggaggctgaggtgggagggttgcttgagcccaggaggttgaggctgcagtgagctgtgatcgtattattgcactccagcctgggtaacagagcaagaccctgtctcaaaaaatgaaagtcatctgtaggctggagagaggaactggaaggggctaaagttggctgagtagttacagagcctgagataagggtaaagattttgcattggacaatgagatgttagtgtgtgtttttgagctggggagtgctgtgattttactcttattgaagaatcactgaaggattattcttgaatcagtgattcttgatcattcttgaatttttcaaacagcaaaactggaagagttggcctattcctcagaatattttctaattgggcgcagtgtcctcacttgggagaacctggctacacactttagttgtaattcactccagtcgttcattcattcaatacctattttttcagcacctattatgagccagacactatgctggatgccagggttcagggtaggacacgctagtgagcaaaagccaagactcttcttgtcttcatggggctttcagtccagcatagtggttatgagtccaagttaatggagtcacagtacttgggtgcaagtcatggtgatggtgatagaaggaaggcatgtgtgagggccagtggcaggcaggagcctggtgtttttgaggacctgaagaaggagcagagtgagtgccaggaacttagccaccagctggtaccagccatacgagaggggcagagccagccaggatgtcggtcatgctagtaatgagtacaaacacttacatgctgcacgctattgggctcctgagtgctacgtgttcattagctcgatgaatttgtacagcaaccctgtgaggtaagcactgttctctcccctttctatagatgaggaaattaaggcacaaagaggataaataactggcaccagctacacgctaagtgatcgaagtggtggaaccaggattcaaatccatgctattctgccttaagataacaaatcttgttttttagcctaagaacagagcagtcatcaggagggttttaagtaggggtgtggcaagatcaagtttgtgtcttgaaaaggtctctctacccacagtgtggaaaatggcctggaggcaagcacacagatgttgggagacagttaacagctcttgccatggccccctatgcattttggctctgatgtttctgcctgatttttctcttgcctctgcctcttttcctgaggggatggcaggttttaccattcagctggagtacaaaccctgaaccctttttggttaaatatctacttgcttttcctacagtattattttgagttgctgtggctgtaatgtcttgagggaatcgagcttgacagtaatttatagaacaaacagtttttagagactgtgtggcccaattgccctctcaatgttggcactcctgccatgacatttaccatgctgagcatgtgaccgccatctgaataccaaatgccacaggaacctgggaggttgtcacttactcctccctttctctgagtcacctttgcccttcagtcagtcaccaagtcccatcacatgtagctctgtaatgtcacagaagatggatgtctgcctcaaaacacttacaatgctgctacctaaattgggcagccacgacctcccaccaggattattgcagcctgagggatctttttgaaatgtaaatcaaactatcacttgtctgtttaaagcttttcaaagacttaccccattgcccttggaagaaagtgcagatatcttgacaggagagccttctccagcctcctcttctgccgtggtctccttgtacagtctctacagtgtactgcttcattagaaccctggagattattatttgctagttctgggctaagaactggcacctggctttgtagagctcctcaggagattctgaggcgtattcagagttgagccctgatctctgctctgatttcgaggttctcgttatatttattaatgatcacgaaaaaatttattattattctttggcctcactttagcatcatctgaggaatttttttttttttttgacagagttttgctcttgttgcccaggctggagtgcaatggcgtgatctcagctcactgcaacctccgcctcccgggttcaagagattctcctgcctcagcctcccaagtagctgaaattacaggcatccaccaccatgcctgctaatgtttttgtattttttagtagaggtgggctttcacagtgttggtcaggctggttttgaactcctgacgtcagctgatccacccacctaggccccccagagtgctgggattacaggtgtgagccaccgtgcccagccgtagctttcgaaatttgaaacctggtcccactgtcagaggttccaatttggcactggtttggttcccaggcatctttcttgctgtatatattttttagtgtcagccagggtggagacctctgtattacttcatggggaagaatttgggagaagatgttgtgaggagacaggttctagtcctagagtgatttatcctttctcgtacagatttccaggtatttgaggggccactcttctgtaattcatgtttttctctcctaacctcactcctgttgcctgcatcttcttgctgagcaaaatattcaaggtcttcaactcctcacaccctggttgtccctccctggatgtgtttggttgttttagtgttccatttcaattttgatacacagaattagaatagcatccagatgtgggtctgttacagctagactactagatccttcaaaatccaagtactagtatgtctattaaaataccataagatcacattggctagttacaatggttggtttgtgggttacttaaaaatcaactaaaattctttttttttttttgagatggagttttgctcttgttgcctaggctggaatgcaatgacacaatcttggctcactgccacctctgcctcccaggttcaagcaattcccctgccttagcctcctgagtagctgggattacaggcatgtgccaccatggccagctaattctgtatttttagtagagatgaggtttttccatgttggtcaggctggtctcgaactcccgacctcaggtgatccacctgcctcagcctcccaaagtgctgggattacaggcgtgagccactgagcctggccaaaattcccactttctaatactcctgtagtagctgggtacggtgggtcacatctgtaatcccagcacttttggaggctgaggctggaggatcgcttgagcctaggagttcgagaccagcctgggcaagatggccagacgccatctctaatttaaaaaaaagaaaaaacaagactcctatagtggtgaagaacagacattccgaaaacagactgtgcgttatgattccagctccatgcctttactacctgtgttgtgactttggataaatcacttaaaaatcttttttttttttttttttttttgagacggagtcttgctctgccgcccaggctggagtgcagtggcgcgatctcggctcactgcaagctctgcctcccaggttcacaccattctcctgcctcagcctcccaagtagctgggactgcaggtgcccgccactacacctggctaattttttgtatttttagtagagacggggtttcaccgtgttagccaggatggtctcgatctcctgtcctcgtgatccacccgcctcagcctctcaaagtgttgggattacaggcgtgagccaccgcacccggccaaatcacttaaaattctgtgcctcagtttctcctctgtaaagtgggataaaaatagtacctatctgatagggttgttacaattatgaaatgagcaaataagtatgtcaagtgtttaaaacagcgcctggcttcttgtaaaaagtgctatataaatcatagctataatcattacttatttcgactgctctttaaccaaggttcttatttttcatctttttcttttgttttgaatatcacttagtgttttcaccttttactctttttaggacctagagccatcctaggtgaaatacgtatggagatatttgatcaggtcaccacccagctctcctgacctcccttctctccttaaattaacatgccaaatcacagcatcactgactccttccctcccgatatgataagagtgtgcattgaaatgcatgtattttacttagcagggaaagctgattagtgattatcacacttaacccctagtgaatctgatggattaacctgctttccaggacactaaggaaatgggtttaagataagaaatatctggctgggtgcggtggctttacgcctgtaatcccagcactttgggaggccgaggtgggcagatcacgaggtcaggtgattgagatcatcctggctaacacgatgaaaccccctctttactaaaaatacaaaaaattagccgggtgtggtggcgggcgcctggagtcccagctactcgggaggctgaggcaagagaatggtgtgaacccaggaggcagagcttgcagtgagctgagattgtgcccaccgcattccagcctgggcaacagagtgagactacatctcaaaaaaaaaaaaaaaaaaagtaagaaatgtccatgaaagggagaccctgggggaaaggaacaataactgcagctctgaggatctggcaccagcagcaccagcacagagggatgctgtacaaccattattgattttaactttacaacagttcttcaaaggagagagagttccctgttttactgaagagaaagcccatttggtagtgaaataccattcccaaagacaaatagctaataaatgtcaggcagggttttgcacccaggcccatccagctcccgtctctactgtcctttcccccacaccacactgatacagaggaatgtgtctggttggggaagtggaagtgttcccaagtggggaggtcatctgatgcacaaatttggtctgttttgtgggttttcttgttttagttttagtttttgtagagctcagacctgttcttaggcagctttaacaatcaactgtgcactcagtaattgacaaatcatgtttgttacttttaatttagagggaattaggtttgttaagctcttgctccttctttagagatggggtctagctctgtcacccaggctggagcgcagtggtatgatcacagctcactgcagtctcaatctgctcaagtgatcctcctgcctcagcctccatgggactacaagcatgggccaccatgctaggctaattttaaaaaaatttttttgtagaggcaaggtctcacggtgttgcccaggctggtcttgaactcctgagctcaagcaatccctcttccaccttggcctctcaaagtgctagaattataggcatgagccaccatgcctggcctttacttctttcatatattcaaattttgtcatattagtagggaactataactcaagttttcttatagattgatgttcatttttacaagcttgatcgtcattggtttttaattttaaagcaaatcctgttatatgtaattgaacattacagtaattatagtaatttgtttcagattgggcactcaagtgttaatattttgtctctttaggaaatcaaaactagatttatatatagacttcttattgcaagtatctagtcttaaatcttacaaaggtactatttggacttaaaactatgaaattgtgtgcttactatataagtgtacttattttgagttatgttttaaacttgaaattccattcttaatgtctagagtaattatgaatggttaaattatgaatgactctaatagtttaaagctacagtatttatttatttatttatttaatttattttttgagatggagtttcgctcttgtcgcccaggctggagtgtagtggcaccatcttggttcactgcaacctctgcctcgcgggttcaagtgattctcctgcctcagcctcccaagtggctgggattacaggtgtatttcaccatgcctggctaatttttgtatttttagtagagacaggcttttgccatgttagcctggctggtctcgaactcctgacctcaggtgacctaccctcctcagcctcccaaggattacaagcatgagccaccacacctggcctacagtattttaatgtggactctctgtcatccattatgctgtttatcctgtggtgaaaattttatgaagattgaatgtttttctctagcgtgaattgctttctcttacttttctcatttttttccttcctaatctacttgcagatacttcagattatttttagaacgtggtatggtgagaacaaataaattggggtttccaaatcttaataaattatgtggccctcagtgggattagcagggttgtattgaaaacaccaatagaaacaaaatagttcttttatgcgctttaaataaaaatttcttttcaggccaggcgcagtggctcacacctgtaatcccagcaccctgggaggctgaggcaggcagatcacctcaggtcaggagtttaagacaagcctggccaacatggtgaagcgccgtctctactaaaaatacaaaaattagccgggtatgatggcgcatgcctgtaatcccagctactccagaggctgaggcatgagaatcacttgaactcaggagatggaggttgcagtgagctgagatggtgccactgcactctagcctgggcaacagagtgagattctgtctcaaacaacaacaacaacaataacaaaacatctcttttcaggccaggtactgtggctcacgcctgtaatcccagcactttgggaggccaaaacaggagggtcgcttgagaccaggagtttgagaccagcttgggcagctggtctctatttgaacaaacaaacaaacaaacacaatactcttttcatagaaaaatgtttactacacaataaactttaaaagaatatgcagctgtattaatgctatgactccaatgtaaaaaaaaaaaaatatatatatatatatacacacacacaaacacattctgaaatagatttaaaggaattacatcaacatgtcaatttttattttttcggagacagggtctcgctgtgtcacccaagctggagtacagtggtgcaatcacagctcactgcagccttgacttcctggcctcaagtgatcctcccccctcagcctcccaaagtgctggggtcacagaccaccacacctggcaacatgtcagtttttgttctgcatagtgggatggtgggatatggatgtttttatcttttattttcttttttatatttttctaaattttccacattgaacattattttataatctttcaaacatatctcttaaaaggactggttcctatagaattcagtgcaagaaatcttctgtgtttctttatactttggttgccttgatcactgggcctttcctgacagcaaagaagaggttagtgtaggcagcagataaaacacaggtatgctctatttaaaatgcatgtatttataataaaagtataggtggtacccaaaggaaaatgtcatgacacattgcaaagtggaacagaagttatctttagatcactttctgttctggattattgtatgagcctgattttcgtctctctttccgccttccctcaccctcgttgtaaatccactagtgcatggatgtgaagtacaagtcttaactttaaaaagttttatgaagctgtgtagtaaatcccttttgtaagtggtcttgactgcgtttctcaatatatcttttggtttcattagattcaagtatataaatgagaactgtaactttggacagactttttcagtcatctttacggtaataagttcccaattagacaatagttatttgttttatgacttgctgttggtaggttatccccaagggactgagaaattcctgttttgaaaagtccaaaaagtctttgatgacttgctgtttcatttttttcttttctcttcagttatagaaaacaggattacacccaccttgcctttgtacagtgcatctactatctgctgacttaacctgagtaaatgctttgaattgagccccatataatgtcctaaggcagcctatatggagtaatgaattgtcttctctcttatgcacccagagtggtagttggcactcaagttgttcctcagataactttgtgtgttctggggctcaatgaagtagttattaagtcacaggcttggggagaacattcatcctatggcattgaatgaagtgttgcccaattctagaatgtctaataaaatttttttaaaaacccacaggcttagaattattccgtagatatgaagtaatgtagttagaacttagtggagttctttagattaacttgtaatttgaaaaaccaaaattgaaattgtgaaataacatgggctctttgaggtcttttccagtaaaacagttacagtaaagctgcttggcagtgattttcctagacactttggctagtcatctcctgtgactgctgttaattaaatatggtttgtagctaagcagcctgtaaggagaagactatggaagtatttgcatattctctccttgaaaatactacctggtctttggctttaagttatacttttattttcccctgtagaataactattaaagtattacctatggtgattagactaagaagtaaaacatgaaatcagtcattgttggtgccctggtgccttcttttttttttttttgagacagagtctcactctgttgcccaggctggagtgcaatggcacgatcttggctcactgcaacctctgcctcccaggttcaagcgattctcctgcctcagcctcccaagtagctgagactacaggcgcccaccaccacgcctggctaatttttgaatttttagtagagacagggtttcactatattggctaggctggtctcaaactcctgaccttgtgatccgcccacctcagcctcccaaagtgctgggattataggtgttagccactgtgcccagcctggtgctttaattttatggaaaaaactactagctggtttctgttttaagaaataacacaggccgggtgccatgacttgcgcttgtactcccagcagtttgggaggccgaggcgggcggatcacgaggtcaggagtttgagaccagcctggccaacatagtgaaaccccgtctctactaaaaatacaaaaattagccgggcgtggtggggcatgcctgtagtcccagctactcgggaggctgaggcaggagaatcgcttgaacctgggaggtggaggctgcagtgagccaagatcgccccactgcacaccagcccgggtgacagtatttcatctcaaaaaaaaaaaaaaaaaaaagaacacaattattgtactacttactagccctcctctgtccccagctaaaaataagaacagcaacaaccaaaaaatccttagttatgtactggaaatgaattagataattttcaataacttacacgtttttaggatatgttagtttgaaaatgcaaatattcatgcatgaccccagtgttaatctatgatggagcaggtatagtgggatgctgtttcatgatttaatttggaccttcagggagtagactgtgatgcctctgcatttgtatccaagacaaataattaaatagtctatttttggctgggcatgatgcctcatgcctgcagtcccagcactttgggaggctgaggtgggaggatcgcttgaggccaggagttcaagatcagtctgggcaacaaaatgagaccttgtctctacaaaaactacaaaaaattagctgaacattgtggcttgtgcccctagtcccagctactcaggtccctgagttaggaggattgcttgagcccaggagttggaggttacagtgatctatatttgccactgcactccagcctgggtgacagagagagaccctgtctcaaaaaataaagtctgtttttaaaattaattttaaacactggagtttattacaaaaagcagttggttctttttttaaatcatttttttttaggagaaccaccgctttttggctacattgtctagagtagcagtgttcaataaaaataagatccaagtcacatatgtaatgttaagttttcttttagtttctttttcttttcttttcttttctcttctttctttctttctttcttttttttttttttgatatgcagtctcactctgttgcccaggctggagtgcagtggcacgatctcggcccactgcaacctccgcctcccgggttcaagcaattctcctgcctcagcctcccgagtagctgggactacaggcatgtgccaccatacccagctaatttttgtatttttagtagagatggagctttgccatgttggccagtctggtctcaaactcctgacctcgggtgatccacatgctttggcctccctaagtgctgggattacaggcatgagccaccatgccctaccaatgttaagttttctagtagccatattaaaagaagtaaaaagaaatgggtgaagttaattttaataatatattttatttaacccaatatatctaaaatattatcatttcaacatgaacaagatactttacattcttttgtttttcactaagtcctcaaaatccagtgtgtattttatattgacagcatagttcagtttgaagcagccacatttcaagtgctcagtagccacatgtggctagtgactccatactggactgtgtaggtttagagtttcagtaaatttgtatgcaatagaatctacataaattggcatattatgcagatttctttgtatgcacatcagttcttgcatagcataagtcaggtcatgatgcttttagtctatgaggcagatttttttttttttttttttgagacagagtctcacttggtcacccaggctggagtgtagatgcacaatcttggctcactgcaacctccatgtgaggcagattttaacttggccctaatgcaaatattgtaagagagatctaatggcctttgatttcttacagagggcaatcaatacatgccatggttacaatgcttcagcatatagtatgcacgtcagccactgcttttactctggctagtgcttagtgtacctgtaccactgcccaggcagcatttgtcctgtggcaggtgaatcttagggtggaaggtggcaagtaacattgcttttttttgagagggagtcttgctgtattgcccaggctggagtgcagtggtgcgatctcggctcactacaacctccacctcccgggttcaagtgattctcctgcctcagcctcctgagtagctgggattacagacggccaccaccatgctcggctaatttttgtatttttagtagagacggggtttcactatgttggccaggctggtctcgaactcctgacctcgtgatccacccgcctcggcctcccaaagttctgggattacaggtgtgagccaccgtgcccagcctacatttttaaattaattaattataagcaggatctcactgtgttggccagactggtcttgaactgataagagttcaagaccagcctaggcaacatggtaaaaccctgtctactaaaaaatacaaaaaaaaaaattagctgggcatggtggtgcgtgcctataatcccagctacttgggaggctgaggcaggaaaatcgcttgaacccgggagactgaagttgcagtgaggtgagattgcaccactgcactccagcctaggcgattccatctcaaaaacaataacaacaaaataacattgttggaatatttagttaatttatagaagcgtattggcctaattggggcaaataccttattctgacattctctctatttgctttactgagctttttcaccagtggaatttaagcccttgatacatgaggagggaaaataccttggagctgtgctgcacatgtaaagtacacaggagatttagaaaacttcgtagcaaaaaaaagagtgtaaagtatctcattaatagtttttgtgggctggacacggtggctcaagcctatactcttggcacattgggaggctgagatgcatgagtctaggagtttgagaccagcctgggcaacacagtaggaccccgtctctacaaaaataatcagccagatgtggtgcgcatctgtagtcccagttacttgagaggctgaggtgggaggatcgtttgagctgggaagttgaggctacagtgagctgtgattgaaccactgcactccagcctgggtgacagagtgcctgtctccaaaaaataaataaataaataataatatgttttgtatgttcatatgttgcaataacattttggatatattaaatgaaataaaatacattaaaattaatttcacctgtttcttttcttttcttttttttttttttttttgagatggagtctcgctatgtcatcaggctggagtgcagtggcacgatctcggctcactgcaacctcctcctcctgggttcaagcgattcttctgcctcagcctccctagtagctgggattaaaggcatgtgccaccacacccagctaatttttgtatttttagtagagacggggtttcaccatattggccaggatggtctcgatctcctgacctcatgatccgcctgccttggcctcccaaagttctgggattacaggcgtgagccactgcacccagcctcttttaactttttaagtatggctaccagaaaatttaaaatgcatgtgtggcctgtattctatttctgttggatgctgctgccttagattattaattattcaatgtaaagactgctgggaggtactacctgcacttccctgaatatatgcttgagagctccaccagccgtcttcacagtagcaagaggggtattctgagtctgtcccccaaagagggagggagaagtgcagccctctcaggttctgtcagaaaacctgatcccaggccaggcgtggtagcttacgcctgtaatcccagcactttgggaggttgaggcaggaggattgcttaagcccaggagttcgagaccagcctgggcaacacagtgaagaccctatctctacaaaaatttttttaaaaaaattagccaggtgcagcaatgctgcctgtactcccagctgcttgggaggctgaggtaggaggattgcctgagcccaggagttagaggttgcaggagttagaggttccacgatcgcacctttcattccgttacatttgctgccttgagaacagaagacctgctggttttgttgccagtttgctcagtcatttttatgaaaaagccagtgctaactaggtgcttcttcgtgccttctctgagaatcaagaactctagtatgtttgcgtgtgttcagtctctcattaaatgttctcactatcccagagaaccatctcattggaccttggtctgtacataccttcatctttggctctgacttgtaattatttttagaacttctctttttttttttttggagacagagttttgctctagttgccagactggaatgcagtggcacgatctcagctcacctcaacctctgccttccaggttcaagcaattctcctgcctcaacctcttgagtagctgtaattacaggcatgtgccaccacgcctggctaattttgtgtttttagtagagacagggtttctccaagttggtcaggctggtctcaaactcccgacctcaggtgatctgcccgccttggcctcccaaagtgctgggattacaggcgtaagccactgcgcctggcctaattttagaacttgttaaaacaacttggcctctattgatatttccatgacccatgctattcagaaagaggattacaggtaattagctggctgggtttctcataccagagcatttcactgggatgttcctgaacctgggacaacttttatgcctggcatttttctttccttctctgttgtcccagactaagcaatttttaaaatagttattatttgttgagtaggagaatctcaggcagatcttcctggatcctcatttatacttttaaacctgtagtcttggaattagtgctctgtcccccaaccccaaacatccaatttctacattttggctacagtacaggtttactgtgtataactaaaagggctgtggaggagaaagaaaggaaccgacatttgttgggcatctgttatgtgccatgcactgagctggatgctgtaggaatatctcaatacctctgaggagtgggaattattatctctattttatagacaagggaatagaaatctgggagttaagtaattttttaatttcacacacttctggtagataatggattctagaacctggcataatagccacttgtcatcccagtgtaaaagagatgtgtggccagatggggtggctcacatatgtaatcccagcactttgggaagccgaggcaggaggatgacttgagcccaggagttcaagaccagcctgggcatgttttgtttgtctcacgaaacattttttaaaaaatgagtgtggcatggtgttgtgtgcctatagtcccagctcctcgggaggctgaggtgggaggatctcttgagcccatgatcatgccattgcactctagcctgggccacagagcaagactctgtcttcaaaaaataataaaaaggagctgtgattatcccaaggtggggattgtgaatgtgtttgtattgttctaaactgggagaaacaggctgggtgtgttggcttatgcctgtaatctcagcactttgggaggccaaggtgggaggatcacttgagtccaggagttcaaggccaccctgggcaacaggcaaaaaatagagaccccatctctattttttaaaaataaaataaactgggagaaagaagcagggtcctccccagagcatctttatccctagtcacagacctgacacctgtgttgggcaatggctacttctagattgtttacccctactgggacttgtggtgaacatatgcacactttggtttacagttgggacccctgattttagcaggatggcccaatggaatcagctacagcagcttgacacacggtacctggagcagctccatcagctctacagtgacagcttcccaatggagctgcggcagtttctggccccttggattgagagtcaagattggtaagtccttcttaagtgactctccaaattgttaggtttcagtttgagtcaagagacatgaactcttaatgtcatgccttgctgttccattaaaaaatgtatgggtacaggtgatggggaaaatgagatcaggagataaaggggcaccctttggtcttgtaaagccttttttatcttagaagggcatgtgggcaactgtctttgacacattgaaaccgcctgtatggtggtggatgtcttgaaggttgatttggacctcatttacttgggcagatcctctatatattctgataatccagtgatgtggtagacatattttttctctgaatgtgaattctgtcatagctagaactttgggttgatacttgtaattcccctttagttaaaggaaggagccacaggggtgtattagtctgttctcaatttgctataaagaaatacctgagactgggtaatttataagaaaagaggtttaatcggctcatagttctgcaggctatataggaagcatagcagcatctgctgctggggaggcctcagcaagcttccaatcatggcggaaggcagagagggagcaggcaggtcacatggccacagcaagagcaagagagcaagggggaggtgccacacacttttaaactatcagatctcacaagaactcactgtctcgaggacagtatcaacagggatggtattaaaccattcatgagaaacccacccccatgatccagtcaccttccaccaggccccacctcaaacagtgggggttacatttcagtatgagatttgggcagggatgtagatccaaactagatcacaggataagggaagtagattccattcatagagcagataatggcacagatgtccagcaactattttcttcactttaatatgctcaggctcactactgattttggtttaattcaggccagtgttaatatgacctggtttttccagaatgcatactctgatttggtgaagggccaggaggtgattcacagatgttggagataggccatcccagcctgggattacttatttgtactaataaatctgaccagagttaattgagggtttaaagcaaaacagcatatctgtctactttgctcaaatattttacaaatacaacagattatgagagtgggtaataatatctggaataattgtttttttgttttgtggtttttttttttttttttttgagatggagtctggctgtagcccaggctggagtgcagtggtacagtctcggctcactgcacctctgcctcttggattcaagcgattctcccgcctcagcctcccgagtagctgggattacaggtgcccaccaccacacctggctaattttttatttttagtagagacagcgtttcaccatgttggccaggttggtctggaactcctgacctcaggtgatccgcctgcctcagcctcccaaagtgctgggattacaggcatgagccaccatgcctggcctggaataattgttaataattattacattgatggcattttattgctgagcaagaagaatctaacatgatgaatgggttatagcatcaggtttgctttgtttttttgtttttttcctctttcttgatggtgatttctgtgtttgtgtgtatgcgtcggcttcagagccattctttatcattcttccttttcctagggcatatgcggccagcaaagaatcacatgccactttggtgtttcataatctcctgggagagattgaccagcagtatagccgcttcctgcaagagtcgaatgttctctatcagcacaatctacgaagaatcaagcagtttcttcaggtatgatgagaaactgaggacaaggagaaacaggacccgcagagtcgggtgttagtgttctttcctggaagcatctcttttctcatttggctaagtaacgagaatctatcttgtattttcaatcacaggagaagtaattagccctttctcaaagctctgtatacttacccgtgagcatcattacctgagaatcacttctcttgtcacagttgaagtaataaagtgattgttatgttaatcatacatgttagcatgttaacgcggtccactgataggaagatgactctcactgttacatgttaaatgtttgaccataatgggatacttcttgactaagtcagtagcttccctgcaagaccaggatagtatactgtgtaaagactcagacaaggccaggcatggtggctcacgcctgtaatcccaacaccttaggaggttgaggtgggaggattgcttgagcctgggagttttgagaccagcttgggcaacataacaagacaccatctctacagaaattttttttaaaaactagctgattgtggtggcatgcacctgtagtcccagctactcagaaggctgaggtgagaaaattgtttgagcctgggaggtcgaagctgcaataagccgtgattgcgccactgcactccagcctggcggacagagtgagagccagtctcaaaaaaaaaaaaaaaagactcaggctaatgtgccttctgttacagaaatagtaacgacctccccttcgccccccgccgacagagagccttcacccaggctctgaagcctttgttccgttgtttcctagaataaatgctttccttgatgaatacattagttttaaggtgccacagttcagtccacatctccatggtctgctgctgatttttattctctttctctcctacttatagagcaggtatcttgagaagccaatggagattgcccggattgtggcccggtgcctgtgggaagaatcacgccttctacagactgcagccactgcggcccaggtgagacctgagacaaaacaaatccctggtctgggaggaatggaaaatcaaacaactttataatgagataaattattagatctactaaaaaagaaggaaaagaaattaaatagatcaataatcataaaaatacattgaaaaactctaaaaaaaaagaaagttccaccccccaaaatacattgaaaaactctaaaaaaaagaaagttccaccaaaagaatccaacagacccaatggtttaaaagttttgttttgttctgacaaattttctttgtttttctttttttttttttctgagacagagttttgctcttgttacccaggctagagtgcaatggcgcgatcttggctcactgcaacctccacctccagggttcaagtgattctcctgcctcagcctcaagagtagctgggattataggcgtgtgccaccacacccagctaattttgtatttttagtagagacggggtttcttcatgttggtcaggctggtctcgaactcctgacctcaggtgatccgcccgcctcagcctcccacagtgctgggattacaggcgtgagccactgtgcccggcctgttctgacaaactttcatagtacagattattccaatatcattcaaacttttccaaagtataggaaaacaagggatgttttcagcttattttatgaggctggaaaaatcctcatatcaaaacctaaaaaacagccaggtgtagtagctcacgcctgtaatcccagcactttgggaggctgagacgggcagattgcctgagcctcaggagttcgagaccagctggggcaatgtagcgagacctcatctctctttttttttttttttgagacagagtctctctctgtcgtccaggctggagtgcagtggtgccatcttagctcactgcaacctccgcctcccaggttcaagcgattctcttgcctcagcctcccgactagctgggactacaggtgtgtgccaccaagcctggctaattttttgtattttttttagtagagatggggtttcaccttgttaggcaggatggtcttgatctcctgacttcatgatccaccggccacagcctcccaaagtgctgggattataggcatgagccaccacgcccagccttttttttttttttgagacagagtcttgctctgttgccaggctggagtgcagtggcgtgatctcagctcactgcaacttctgcctcccaggttcaagctattcccctgcctcagcctcccaagtagctgggactacaggcgcgcgccaccacacccagctaattttttgtgtttttagtagagatggggtttcactgtgttagccaggatggtctcgatctcttgacctcgtgatccgcccgcctcggcctcccaaagtgctgggattacaggcgtgagcaaccgcacctggcttaattaaggatctttctaaacacaagaaagaatatttatcagaaaccaaagggagcatgatgcacagtggtgaaacactattctcagtaaaaacagcaaaagataaggatgtcttttaccattgatacttttctgagggatccagcctatgcaaaaagaaaaagaaatgagggtacaaatattggaaagcaagggacagaactcttattatttacagatagataggtcttcctcgaagatccaagagaaacaaaactaacaataacaattggaactagcaaggtttagaaaggccattgtatacaagataaatatttttagaatctgcagttcccctaatcagtagcagcagtaacctgttagaagatgtaatgaaagtaaagatctgggccaggcacgatgtctcacgcctgtaatccaagcactttgggaggccaaggtgggcagatcatgaggtcaagagattgagaccatcctggccaacatgatgaaaccccatctctactaaaaatacaaaaattagctgggtgtggtggtacgcgcctgtagtcccagctactcgggaagctggggcaggagaatcgcttgaacctgggaggcggaggttgtagtgaaccaagattgcgccactgcactcctgggcgacagagcgagactccgactgaaaaaaaaaaaaaaaaaaaaagaaagatctgattcatagtagtaaaactaaatgtatgcaatttgcatatactattggtatgtatgggaaaatatctggaaacacatatactaaatcattaaagtagtcggtcataggagacttttttactttctgtgaggggttttaccgtctttaatatcctataatcagggacattttttctttttctccgtgaccccctgctttttaaaaaattgtggtgaaatacacataacattacatttcaaatttacctttgtaacctttgttttttttttttttttttgagacagtctcactctgtcacccaggctggagtgcagtggtgtgatcacagctcactgcagcctcaaccacctgggccctagcgatcctcctgcctcagccttatgagtagctgggactacaggcacatgccaccatgcccagctaattttttttttttttttttttggtagagatgggctcttgccatgtttcccaggctggtgttgaactcctgggctcatcaactgatgagaaagagctctccaggcagaaagaagatcatgttcaaagacagaaacagaaatgtgtattcttgggagaagtgtagaaagttcagcatctgattgggtcggggaagacaagctagtcaaggccacatgatgttttaattagtcatgcctaacagtggggccctggaagagcagtttaccacaaggggccaactgcttcggtttgaacccgcagccctgccacttgctctgtaaccttaagtaaacaatttttactctctctgttcctccaatgggagtgataacaataccttcttcatagaattaattcatacatgtaaaatgcttagaacagtatctgacacataaatgcaaaataatttaactgctttctgctgctgctgacatcactatcatcaccctcaccattactgtaggaaatggggacccagtgaagaattttttttttttcttttgagacagagtctcactctgtcacccaggccggagtgcagtgacgcgatttcggcccactgcaacctctgcctctcaggttcaagcgattctcatgtctcagcttcccaagtagctgggattacaggcatgagccaccacactgggctaattttttgtatttttagtgagatagggtttcaccatattggccaggctggtctcaaactcctgacctcaggtgatccatccacctcggcctcccaaagtgctgggattacaggcataagccactgtgtccggccctagtgaggaattttaagcagaaaactgatatgctcaggtgtgagcgaggtggtaggtaacacttactgtgcagtgccctgtagcccaagaggttagcacacaggcatttgctcaggcagcactaggattttctgctgtggaaaacctttgtattttatcctgctccacaagataaaaataagtggtttaagtcaatttggatagaggctccaacttaccatgggaggtaggaaagccaaagttatcccaaggatgttttcaatcgtacggattaggggtctgcaaactgtgagcgtggcccaaatccagcctgctgcttgtttttgtaaatgaggttttttcggaacccagccacactcatttatttatgcattatctgtggctgctttggtgctgcagtggcagggctatttgtggcagggactgtatgacccaggaaaccaaaaatatttaccctctgtcccttagagaaaaagtttgcaacccctgatataaagctataagttggttatttgtggcctcaacccaggcctcactgctattttttctgtttacaatacctggcatgctcttaagtgtctagaattggttaaagatagaagagtggatgtaatccctgctaccaagggctgtcaggctagttgggattataagtacacaaacactcaaagtgagaaaaacacagaaaaggatgtgtgtcattttgtctaaggaagttgaataagatttctcaggaaaagaaacatttgaactgaatttgaaggtgagtgagttcaggtgtgtttgggctgaagcccaggccatgctgagtggatagcgggtgggaagagagtgtggaaacacactgcatgcagggaagagttgggagtctggggtgaccaaggcacagggagggaaagttgaagttatcaattgtgtgaaacagctttctgtgttggcctgagatgtttatagctggaagcagtggggagccaatacagttttttacgaaggtattagaggtgggtttctgtgggtgatcgttaatcatgttttctccctttaagtgtagtcctgcttgagaaatagacatgagaaaggaatgaaggttaaaacatcagctgtattgttggtaaaactagaatggaaagtgtggcttgagctggtaaccataggggctttccaatgcctgtgccctgagttagatcttggggtagagagactggatgtgcagagcagcacccccaccccaccccagccatccatatggagcttcagctgccatagaccaacaaggcagagggataggcctctagacctgcttctagaaaccaggctgctgctcttgcttatggtgggccctaggaaggcaagagtgagaggagggaggcaccagcttaggtgctgggttctttgaagatctgtgtgtacacagagtctttctctccatcttaccaatcagatgagtcactgtcactgtgggaagaagtaggggcatgggtcaccttcccaaaacttctaagaagtttgtattctgtgggcttggatagggaccatgggaaaggaagagaatggttgcccataaaactggctgtagtgtggcctcaaacttctggacttaaatgatcctcccacctcagcctcccaagtagctagaactacaggtatatgccaccatgcccagctagttaaaaaaaaatttttttttttttttggttgagatgaggtctctttctatgttccctgggccggtctcaaactcccagcctcaagtgatcctcctgccttggtttcccaaagtgctaggattataggtgggagctaccatgcctagcccaagcctgtaattttttttttttttttttgagatggagtttcacttttgttgctcaggctggagtgcatggcgcagtcttggctcaccacaacctccacctcccgggttcaggcgattctccttcctcagcctcccgagtagctgggattacaggcatgcaccaccaagctcagctaactttgtatttttagtagagatgggtttctccgtgtcggtcaggctggtctcaaactcctgacctcaggtaatctgcccaccttggcctcccaaagtgctgggattacaggcatcagccaccgcacctggcacgaacctgtaatttttaagtttcatatgctatttattttttgttatttctttaattcattcattcatttattcattcgagatggggcctcactatgttgactaggctagttttgaactcctggcctcaagcagtcctcccacttcagccttcccaagtgctgatattataggtgtgagctgctacatccagccttctttcttctttttctttttccatgtgctatttgacattttccaaggtaccagcctccccttctccccaagataatatcttttaatatggaatttcatccctagggcaggactttttttttattatccctcagaaatatactggacaccacgtttaagtagacatccaacatctgctgtcataaattgttttgaattttttgacatacttgcccatgaggtttttgaaggcatagaccatgtcttagctgaacatgtggtctcttagtgccataaagggggtttatggtatgacctgtgtagtgtcacctgtgtagtgacagcaccactgcctctgtttcccttcctcttgtgatggcagcagcgtctcaagccaaacaagaagggtagttagggtgggatggaagctgggtagaggtattcctctccccatagttctgtgttcacatgtgcattgacctcctttttggcagcaagggggccaggccaaccaccccacagcagccgtggtgacggagaagcagcagatgctggagcagcaccttcaggatgtccggaagagagtgcaggtgatgcaagttacaagcctcgggcagggagctttcattaatttttttttttttttttgagacagggtcttgctctgccactcaggctgggctgcagtggcatgatcacagctcactgcagcctcgacctctcaggcccaagcgatcctcctacctcatcctcccaagtagccgggaccacaggcatgcaccaccacgcccagctaattaaaaaaaaaaaatttgtagagatgggggtctccctgtgttgtccaggctgatcatgaactcctgggctcaagtgatcctcccaactcagcctctcaaagtgctggcattacaggcgtgagccactgcacctggccaacagggagccttctcttggggatactgcctgcaggtcctgcatgtatcttttttgaggttttggcttcatttgaattctcctcagaaactttatattttctgttcccaaggaaatctttctttacttctgtttttttgtttgcttattttaaacaggatctagaacagaaaatgaaagtggtagagaatctccaggatgactttgatttcaactataaaaccctcaagagtcaaggaggcaagtgaatattagagatgttaaaatctctagaaagtgagtttgtgttgttgagttgaaagactcatttgtcttaactctgtttagatcttaaggcgggcggggcgcaagggaggtacgggtcctcaaaggagcctggtcattaaggacaggagtattccctcaggtccaggagtattccctcaggtccaggagtattccctcaggtcaaggagtattccctcaggtcaaggagtattccctcaggtccaggagtattccctcaggtccaggagtattccctcaggtccaggagtattccctcaggtccaggagtattccctcaggtccaggagtattccctcaggtcaaggagtattccctcaggtccaggagtattccctcaggtccaggagtattccctcaggtccaggagtattccctcaggtccaggagtattccctcaggtccaggagtattccctcaggtcaaggagtattccctcaggtccaggagtattccctcaggtccaggagtattccctcaggtccaggagtattccctcaggtcaaggagtattccctcaggtccaggagtattccctcaggtccaggagtattccctcaggtccaggagtattccctcaggtccaggagtattccctcaggtccaggagtattccctcaggtccaggagtattccctcaggtccaggagtattccctcaggtccaggagtattccctcaggtcaaggagtattccctcaggtccaggagtattccctcaggtccaggagtattccctcaggtccaggagtattccctcaggtcaaggagtattccctcaggtcaaggagtattccctcaggtcaaggagttttttcttccttcgcagacatgcaagatctgaatggaaacaaccagtcagtgaccaggcagaagatgcagcagctggaacagatgctcactgcgctggaccagatgcggagagtaagggcataggtcggaccacttcccccatgtgtctcgctcacttgcgggatttcagcgtcttgtggcagaacttgcttggtttctaagaagttcctgctctggagttgactaaagaatgtggttagagacagtctgaggaaatgttttctgactttgttttggtttccaaccagagcatcgtgagtgagctggcggggcttttgtcagcgatggagtacgtgcagaaaactctcacggacgaggagctggctgactggaagaggcggcaacagattgcctgcattggaggcccgcccaacatctgcctagatcggctagaaaactggtaaaggatgaaagaagcttttcctttctttctcgaaagctagattgaattctgatcttaactgcaggcccacagaattggtactatatctccaacgtggggacttttccatattcaaatttagcccaagaattaaagtttttactttatttcggccaggcgctgtggctcacacctgtaatcccagcactttgggagaccaagatgggcggatcacttgaggtcaggagtttgagaccagcctggccaacatggtgaaaacacatctctactaaaaacataaaaaaattagccgggcgtggtggtgcgcacctgtagtcccagctactctgggcggctgaggcaggagaatcacttgaacctgggatatggaagttgcagtgagcggagatcttactaccgcacaccaaccagcctgggagacagagtgagactccatctcaaaaaaataaaaataaaataaagtttttactttatttggagaaactttgttttaaaaaatgtatttatattattatattttaagtatattttacttaataattcaattaaggcttttggtttaactgtatttaacagatagacaaaccttttaattttagttattttagtaatctaaaatgacacatgccctttttaagggaaaaaattcaaatacagaaaattaatcaagagaagaaaaaatttttaaatgaaatcatcagcagtactagtagttaaaatttagttgatgctcaatctagacatctgtcattatgtatatacacattatgtatatacacataaagatagaaatttatacagtttatattaggatcatttttttttctttttttggagtcagggtctcactgtgttacccagtctagagtacagttatgcagtcatggctcactggagccttgacctcctgggctcaggcagtcttcccaccttagccttctcagtagctgggactacaggcatgcaccaccacacctggctaatttttaaattttttatagagacagggtcttactttgttgcctgggctggtctcaaattcctgggctcaagggatcatcccacttcggcctctcaaaagctctggaattatagatgtgagctgccgtgcccagcccaggatcttcctttatatgcttttctgtaatttgcacttttaccttcatccagcatatcttactgcaacccttcctgtgcaaggccctatagtgagcatgttgcaccagcttgccttaggagaaacttgagatacagagcctgcactggaaatttagcgcaactctacatgagaatgcctgtctattcatatcctcactaaccctgagtgttgttaatttactgaaagcagttttaaatgcttcctgaccagggaacgaagaagcttaagttctgggaatgggaggatagaagtgccagaaaagagctcaggagttcagaaatccctgcagcggtccccctccctctcctttcactttctgtctttctggtcttttggtctttgttacactagtgataaaccatcaaagaatgatggaatgatgctaacttctctctttttttaatttttttgagacagagtctcactctgtcacccaggttagagtgcagtggcatgatcttggcttactgcaacctcctcctcccaggttcaagcgattcttagtcacaaccttccaagtagctgggattacaggcccatgccaccatgcctggctatttttttgtattttagtagatcgacctgcctcggcctctcaaatttttgggattacaggtgtcagccactgcacctggcctaatatctctattcttggagatagatttaatgagctttttctccctctctattcacttattccttgtgcatgttatcaatattttgaaacataatgtcatgtcctttgatcagttgaaggctgacattgaaaaggcttatggggattgggtgttgtggctcacgcctgtaaatcccaatgctttgggaggcagagtcgggaggatcacttgaacccaggagtttgagaccagcctgggcaacaaagtgagatcccatccctacaaaaatttaaaaaactagacatgtgccattacacttcagcctgggtgacagagtgagactccatctcaaaaaactaaactaaactaaacaggcatggtggcacacacctatagttctagctactcaggaagctgaggtaggaggatcactcatgtccaggagttggaggaggcagtgagctatgatcatgccattgcactgcactaggccacagagtgggaccctgtctcaaaaaaaaaaaaagaaagaaagaaaagaaagggctcatgtagttcaagcccttctcttcatgcaaggggatgctaaggcccatgatggtgaagggcctggcaaagcttgcacagatagtgtgtgacagagctggctcaaacccatctttgggagctgtctaatctctttttctgagtctttatgttcatagacaagttaggatgagtaaagtaagtgctaaattccatatttcgtgttctgcatatctgggctcagatgcttgtcattttccagtgataactccatcaatgcctcctagtggtataaattttaatacttcttgtgtgcccagccccctcttagaaatttgagattttaggaagggactagtaataaaaggtaaaataaattattttctggccaggcatggtggctcacacctgtaatgccagtacttcgggaggtcgaggcagatggatcacctgaggtcaggagttcaagaccagcctggccaacaaggcaaaatcccatctctactaaaaatgcaaaaattatccgggagtggtggtgggtgcctgtaatcccagctacttgggaggctgaggcaggagaatcacttgaacttgggaggcggaggttgcagtgagctgagactgtgccactgcactccagcctgggcaacagagtaagactctatctcaaaaaaaaaaaaaaaaaaaaaaaggccaggcgcagtggcttacacctgtaatctctcaggaggctcaggcaggagaatcacttgaacccgggaaatggaggttgcagtgagccgagattgcaccactgcactccagctcaaaaaataaataaataaataaattattttctttttttatttattttttcagcatccacccaacatggtgaaaaattcctcttttcttaatgtcactgaactgtaaacttaagatgaaaaattgtaaatttcatgctatatatatttcaccacaataaaaaaattccttgttcttattgtagtggtctccatgtcttcagtatttccttccccttctccatctcacctgtatacattcactttggtaattagcatctttcttaatttattggcaggataacgtcattagcagaatctcaacttcagacccgtcaacaaattaagaaactggaggagttgcagcaaaaagtttcctacaaaggggaccccattgtacagcaccggccgatgctggaggagagaatcgtggagctgtttagaaacttaatgaaaaggtaatttagcatccttgtccctttccctcatctaaaaaatacctaaagactcacgtggtagagtgagaggcgggctgacttctggtcatggccgtggcgcgtgagcccatcttctctttcctcagtgcctttgtggtggagcggcagccctgcatgcccatgcatcctgaccggcccctcgtcatcaagaccggcgtccagttcactactaaagtcaggtaggccatgccacttccatttccagtagagattttactgagggacactgttagggtgagggtagagttggtggccagggtcattctttccaggtgtggtgtcacaggcagtacactgttgcggggttgaaatttgttgccatactatctgcttgctctctgattctgatgtcaaaagcaaaagagcagtcatctttttgaaggtacctgggcatattcctatgattgtagacctggagtctcaggccacagcttctccttctgcccaagggacaaaataatgtcatctattttctgttctttgaggctactcttccctgtggattttaagggaaagagtaaggcttagtgatggggaagctgagaggccccagggcaggtgggtggtgggcctgtagggtgaggtgttactttcacactcaagtcagaacaggtgtgctggggttttgaccttctgcagcaaaatttccctcctcagaaacttagtatggtgttcggtttcaggattaatagaacaaaatgccagctgcacagcatgtgttcctgtaatatttttcattatatggctttgattatccttttgtgaatctctcacaactttaagttgttagttcttagatgttttctcagtacctttggcttgaaggagtgatactcatcttttgtttttgtttgagacagggtctcactctcacccaggctggtgtgcagtggcatgatctcagctcactgcaacctccatctcccaggttcaagtgattcttgtgcctcagcctcctgagtaactgggaatagaggtgcgtgccaccacacccggctaatttttttttttttgagacagagtctcgctctttcggccaggccagagtgcgtgttgcaatctcaactcactgcaacctccacctcccaggttcaagcgattctcctgccttagcctccctgagtagctggaccggcacactccaccatgcccggctaatttttgtatttttagtagagacagggtttctccatgttggccaggctggtctcaaaactcctgacctcagtaatccacccaccccggcctccaaaagtgctgggattacagatgtgagccaccacgctcggcctttttttttttttttttttttttgagatggagtctttctctatcacccaggctagagtgctgaggtgtgatctcggatcactgcagcctctgcctcctgggttcaagtgattctcctgcctcagcctcccaagtagctgggattacaggtacctgccaccatgcccggctgatttttgtatttttagtagagacggggtttcaccatcttggccaggctggtctcgaactcctgaccttgtgatccacctgccttggcctcccaaagtgctgggattacaggtgtgagtcaccgcacccagccctattttaatttttttaaagagagagataggggccaggcacggtggctctcgcctgtaatcccagcactttgggaggccaaggtgggtggatcacctgaggtcgggagttcgagaccatcctgaccaacatggagaaactctgtctctactaaaaatacaaaattagctgagcgtggtggcgcgcgcctgtaatcccagctacttgagaggctgaggcaggagaatcacttgaacccaggaggcggaggttgcggtgaacggagattgcgccattgcactccagcctgggtaacgagagaaactgtctcaaaaaaaaaaaaagagaaagagagataggatctcgctctgtcatctaggctagagtgcagtggcatgatcatagatcactgtagccttgaactcctgggcacaagtgatcctcttgcctcagcctcccgagtaactgcgactacaggtacatgctaccacaccccgctaatttttaaattttttatagatgtgggctctcactttgttgcccagactgttatggaactcctgggctcaagggatcctcccagcttggcctcccacagtgctgagattatagatgtgagcctgtaattatagacagcttggcctatttacctgttggaaatgaagaattatgaattttacatttcttcaagaaaaggttatgggagagttactgactttttttccttggattttttctttttaaataggttgctggtcaaattccctgagttgaattatcagcttaaaattaaagtgtgcattgacaagtaagtactcctatcttagctctgtttttcaaatgaggaatagaaaaatgagaactttgacagacatcatttgaactagagactctgtctttattcagagatcttcattttgtggacaaaagttttcaaaagccttggggtgcattgtcatttacgtgtctgaacaaagccacaaagctgggggtacagatttgatttgtggttgctattgtgacaaccagtccctcttttccttgtttagttttttacttgtacatgtcattcatgcatattatatataagactgagatcatgtgttaattaacgactgggatacgttctgcaaaatgtatcattaggcaattttgttgtgcaaatgttgtagagtatatagtccttacacaaacctgggtggcagaacctactgcacacctacgctatgtggcagagcctactggtcgtaggctgtaaacctgtacagtatgttactgtgctgaataccgtaggcaattgtaacacatctcaatgaagtaggaatttttcagctccatgataatcttatgggaccaccatcatatatgcattttgttgttgaccgaaacgtcgttatatattctttccatacatagcatgtggaaagaatagatctcttttttttaattgttccacactttaccatataatggaatacgcaaaatttcacaatacctttcaggatgtaaaatacatataccctttgacgacattagaaaagagaaaatgtgggccgggcgcggtggctcatgcctgtaatcccagcactttgggaggccgaggcgggcggatcacgaggtcaggagatcgagaccatcctgggtaacacggtgaaaccccgtctctactaaaaatacaaaaaaactagctgggcgtggtggcgggcacctgtagtcccagctactcaggaggctgaggcaggagaatggcatgaacctgggaggtggagtttgcagtgagccaagatcacaccactgcactccagcctgggcgacagagactccatctcaaaaaaaaaaaaaaagaaaagaaaagagaaaatgtggctgggcgcggtggctcacgcctgtaatctcagcactttgggaggctgaggtgggcagatcacctgaggtcgagagttcgaaaccagcccgaccaacatggagaaaccttgtctctactaaaaatacaaaattagccaggtgtgttggcgcatgcccgtaatcccagctacacgggaggctgaggcaggagaatcacttgaactcaggaggtggaggttgtggtgagccgagatcacaccattgcactccagcctgggcaacaagagcgaaactatctcaaaaaaaaaaaaagaaaaaagaaaagataaaatgcattcttatttttagttgatgtaattatgtggaaatttcatgaggatgcactggaaaataatgaaataagggagttgacgaaggtggtaggtttaataagtacatatgcaatatgaaacataggttccccttcctatggggaggcaaccaactgtgcctgctacgcagaggtgttatgttgcgctgatcaactgtaactgaatagtttaaagaaatgcccaggagcacagaggttttttcatgacagtaaataacaggtggtcaaagtaggctttttgaagaaacacagagcctattttattaacaacagtctgtgttcttacagagactctggggacgttgcagctctcagagggtaagttcagcctagaggcttccttttgttccgtttaacctaacttcatcctccggctacttggtcacctacatagttgattgttcccctgtgattcagatcccggaaatttaacattctgggcacaaacacaaaagtgatgaacatggaagaatccaacaacggcagcctctctgcagaattcaaacacttggtatgtgggaggagctccccttcacaaagggcctctggctgccggagagggctagggagagcctcacaggacacctgcctttttcttttcttacagaccctgagggagcagagatgtgggaatgggggccgagccaattgtgatgtaagttttgttggggatgaaagacaactggggtgttttccttgagggagagaggggtaaagatccttcttaatccccagaattagaaacatcaacctgttctttcagctgtagttattccaaaaagtcacttcaggccaaagtgacatgaacagaagttccatgtgccatggagctctctggcttggaacatttccgtgaatatctgggagttggctcctccttaaggagaagtggaaagtcccttgctgagttgttctccacacccatgtggtataaagcagctttccaccttgcctggggctttccaaattccccatccagctcctgcggctgaccctgcttggctccatttttagtgccctgtttttctctcccactgaggtgggatagagggtgtaaaagcaacagatttgagttaaactttaaaataaatgaccaccttgcattagcttgcttaggaaaagagtacataaaataaaatgaacaaacaaaaacccatcttgttctttatcccccttattttctgcttttcattgattcagattattggattcttattgtcaagaataaactttaaacaaacaaacaaaaaaaggtaaatgtgacggaaggctagttttcagtcatttttaaaaattgtgatgccccgttctttttcttacatttgtcccctgaacaattcttcctctttaaaatgtagcagtcctagctgggcgtgctggctcacaccccgtactttgggatgccaaggcaggctggtcacttgaggtcaggagttcaagaccagcctggccaacatggtgaaagcccgtctctactaaagatacaaaaattagctgggtgtggtggtgcacgcctgtagtcccagttactggggaggctgaggcatgagaatcgcttgaacctgagaggtggagcttgcagtgagccaagattttgccactgcactctagcctgggcaacagagtgaaactctgtctcaaaaaaataaataaaataaaatgtagcagtcctttttaaaaatgtggaattttacttgacagtagagtgaagtagcctgtatgcaatgatatgggaaaatgtacatgacatattaagaaaaagcaaaatgtaaaataatttgaatagtattattagtatatgtgttttaaaaatacactatactcttatgtgtattcatatgtatattaagaaattctggaggaatataccagcagtgctatgtgtattagtgctgctgttggtatccatggctattctagactgtctctgtgatatttgcattttaaactgaatatattacttttataatcagaaaaatagtattaaaaatgaattataatttaatttcttttttcttttttttttttgagtcggagtctcgttctatcggattgcagtggtgcgatctcagctcactgcaacctctgcctcctaggttcaagcgattctcctgtctcagcctcccaagtagctgggacgataggtgcatgccaccacgcctggctaatttttgcatttttagtagagacagggtttcaccatattggtcaggctggtcttgaactcctgacctcgtgatccacccatctcggcctccgaaagtgctgggattacaggcatgagccgctgtgcccagactagaattcaatttttgagaattcattgacaactcttacttaaaataaggttgctgtactgatgtgagacattgttgtagtcagtttggaaaacaatttggcagtataaaaatgaacatacctgtaaaccaacggtgccattcccaggatttaatagcagagaaatctttgcatatatgtcccaggagacatatataaagtggacatcagcctgattataagctctaaatgcaacccaaataaatacccatcaacattagaatgaatacattatttgtggtatagacacaatggaatactccgcagctgtgaaaaggaatacactgcagatacacataaccatgtggattcatttcacatcaagtgaaaagtgaatcccaaaagaattcattggagtccataagtgtaaggttcacaaatgtcccaaactaaacaatacctgcattgcttagataaacaaatatggtaaaactgtaaaaaaacaaaacaaaacaagacaaaaagggctaggaaatgataaacccaaaagacaaaatagcagttatttctgagggaggagggaaggggatggggttggggaagggcacccagagaattttaggagtgatggacttttccttaaattgaatggtgggttcatattgttttgttattctttgtgccttacgtattttacaaataaccaattggatctatgtaatattataatacaaactgagtaaaggattaggttgaggatcacagcattggaagttcttggtgttgaagagagtaagtgccgagcaagttgtgtccctggcagtttgtttgtgaccacctggtggcttacccttcttggtgtggtgaggcttggcatgtcactttccttggctgtggctgttagtactgaatgccattctctctgaggaaaagtgtccttctcttttttattgattgactgattgattgagacagagtctcactctgtcacccaggctggagtgcagtggcgtgatctcggctcactgcatcctctgcctcctgggttcaagcgattctcctgcctcagcctcctgagtagctgggactacaggcgcccactaccacacccagctaatttttgtattcttagtagaaacggggtttcaccaaattattggccaggctggtctcgaactcctgaccatgtgatccacctgcctcggcctcccaaaatgctgggattgtaggtgtgagccatcacgctcagcctttttttttatttaatttaatttttttttaagacagggtctcactctgtcaccccagctagagtgcagtggcacaatcatagctcgctgcagcctccatctcctaggctcaagccatcctcccacctcagcctctcgagtagctggggctataggtgtgcaccaccacacccagctaatttttgtattttttgcagagatggagttttgctgtgctgcttagactggtctcgaactcctgggctcaggcaatcctcctgccttggcctcccaaagtgctgggattacaggcatgagccaccacacctggcctaagagtgtccttctcgttactgtaggcttccctgattgtgactgaggagctgcacctgatcacctttgagaccgaggtgtatcaccaaggcctcaagattgacctagaggtaagttctgcagcagaatcggtgagaggctacgtacaggggtgactcaggacaaaaacttccactgggatttttacaagagaaggtggaatgattactgtttgcttaacactgtgtttatttttgcttacttttctccaaaaaaatccttggcatcccatctggcaataaagtcttgcttgaatgcttagaagatgtgtgtatattcagctttcagcaaacttgatatgaaaatctctatttagaaattgattggccgggcgcggtggctcacgcctgtaatcccagcactttgggaggctgaggcgggtggatcacgaggtcaggagttcgagaccagcctggccaacatgacgaaaccccgtctctactaaaatacaaaaattagctgggtatggtggcggacgcctataatcccagctactcgggaggctgaggcaggagaatcacttgaacctgggaggcagaggttgcagtgagctgagattgtgccattgcactccagcctgggtgacagagtgagactccgtctcaaaaaaaaaaaaaagaaattagaactgactttataaagtttgggcataagagtcttagcagccagtgtgtttagtatacagaaaattgtggcaatgacattctcctttcccaactttcttgatttttaaattaagatatacctagaaaagcaggaatcctggtctttgattcctgagacctccctgtttcatgtgaagatacagcttcaagtcttggagaatgcctccaaggtcttaaaaatggggaatctgtggattgtgagtcaagctttgagcaagtcaggttttacaagggaccggtatattccgactgcagcctgagttgtgtggccacgctgggcattctttccactatgagtgctcactgagctgactcactcacactcctcgcctagagttggcagcaggtgtggtttatggcatgtcctttcattctgagccccgtgagatgcgggtgaagagatttccaaggctgtgagagcccctctgcctccccagctcagtccccactccctccgcagacccactccttgccagttgtggtgatctccaacatctgtcagatgccaaatgcctgggcgtccatcctgtggtacaacatgctgaccaacaatcccaaggttagtgccccctccttttagttggtgccccgggatctcttgcgacttaggggtacctagtatagacaatgagcaccatccctcatctaaacaagcaaatgtgttctttccaatagaatgtaaacttttttaccaagcccccaattggaacctgggatcaagtggccgaggtcctgagctggcagttctcctccaccaccaagcgaggactgagcatcgagcagctgactacactggcagagaaactcttgggtccgcatttcaccccttctccctcccgcccacccgcccagaaaagggatccggcccatagggctgttcatttgggccatgtctactgagcattaggccatgtttctttcctgagcaaggcgctgtgctggtgccaggaaacaggggagttggggagttggggtgcagagacagtttgcagttttcagtcgaggtgatcatttttgaggtgggaggtagatttcttttctcctggttgctgtctcattcacccactctatctaactttagaagatcttttaagtgtgtgttggaaggtggcactaaaggcttgacattccctgtccatttttttaataaactataggctagttggttttttttgtcttattttatttatttatttatttttttgagacgagtcttgctctgttgcccaggctggagtgcagtagtgtgatctcggctcactgcaacctccgccttctgggttcaagcgattcttctgcctcggcctcccgagtagctgagactacaggtgctcaccaccacgcccagctaatttttgtatttttagtagagacggggttttaccatgttggccaggatagtctccgtctcttcacctcgtgatccgcccacctcggcctcctaaagtgctgggattacaggcttgagccactgtgcccagcgtaggctagtttttaaaaaagaattagtggaatattttatgtgccacctgggctagaagtagctttgttctaataaagctgttgccaccaaatacacctgtctgacacccgatgtcagcttgttagtgagtgctgctgttggttcccagcctaccacccgaggttgggaagagcagggggacttgttatatcaccctccatccctgctgggctacccagcaacacaagtgagtcaaatgatgggatagtgtttgtcctcatgtgcacacacacaacagtgcctaccttcaaagatgtgaaagctgattattttgtggcccattgtgggatgaatgtgtgtgtgttctgttttaagaaataacctcttgaccccaagctgaaaatgtactacttgactctttttctttccttcaggacctggtgtgaattattcagggtgtcagatcacatgggctaaattttgcaaagtaagcaatcttgttaaattctcgtgggaatgggaatgctcacctgcacggctgtcgttgagggctctggcttgaaggccctgaactcttggtccagcggccagtaggacctgcctgaaggtagacgggcctgaggatttgggtgatgcactgcacccctaggaagggaagggctgggatggcagtagacttggctttcccattactcttttctccaggaaaacatggctggcaagggcttctccttctgggtctggctggacaatatcattgaccttgtgaaaaagtacatcctggccctttggaacgaagggtaggttggacagagtgtgcacagatgtaaccaagtcccctgctctcagcaagccagtggcaggggatggatgccctgttagcaataacaacattgttcctcctccttggctccaggtacatcatgggctttatcagtaaggagcgggagcgggccatcttgagcactaagcctccaggcaccttcctgctaagattcagtgaaagcagcaaagaaggaggcgtcactttcacttgggtggagaaggacatcagcggtaagggaggctcccacccaccccacctgctggtggctgctgaggcctcatcactgcttctagttgcaagcacctactgccccctggtgggtggagatggccttgactccctgtttcactcagactcgcaaaacacatttgcgtgacttctaaatccttccagctgaaggattggtttgctttgttttgcttgctccagtgactatttgttgagaattttgcaatttaaattgtattcttcatctctttttctacttaaccctgttaatatatcttacgcaagtagttatattcaagtttattttctatgacccaactagtagcctcttcttaattagaagccagcctgaatatttccacagtgccaggccactgaacagggtgttcagggtctcaacactagggtggcttaagtcttttccccttcgaggaaagaaaaaatgggcagttttctctgagatgacctagctgtaggttccatgatctttccttcccatgtcctgtgacaggtaagacccagatccagtccgtggaaccatacacaaagcagcagctgaacaacatgtcatttgctgaaatcatcatgggctataagatcatggatgctaccaatatcctggtgtctccactggtctatctctatcctgacattcccaaggaggaggcattcggaaagtattgtcggccagagagccaggagcatcctgaagctgacccaggtagttgttgattttccatgttcctggcatttaatttttgggaaaagttggaaattttgggatccttggaggatagataggcaaatgcctgaataacctgggggataattatttctccttatgggaaagaattgtagtgagtgcttttgttggggtgaccgatgggatttgagaggagaatcagaatcacttagagtagtgtagttcctgctccacagagagtgcatgagtctaaagaggggatacagcctgggcaatatggtgaaacctcgtctctacaaaaaatccaaaaaaattacccggtgtggtggcacgcatttgtagtcgtagctacttgggaggctgaggtgggaggatcacctgagccaaggagttcaaggctgtagtgagcggtgatcatgccaccgcactccagcctggctgatagagtgagatactgtgtcaaaaaataaaaataaagaggggatcaatacacatacgtcccccaaaacatgcctgaaacacgagaagggaaagtgagggcagttaacaggatgccctgctggcacagtgcttcttagtagatgctagaaggtttgaggcccagatttcagcccagcatatggctttttgcctgtaactgaaccatgtcagtgtgccagatggtctgaagaaagggtttctggaggaaattattattagctgcatgggagtatggtttacactagagtagaagagctgggagcatcacgtttgaaggggaagacagtgactgggtggaggggcaagggattagtatttagagtgtgcaactattgaaaataaggtatattttaatgtgtaagaggacatgtacttatatgttatatataaattattttagctgggtgaagtggctcatgcctatagtcctagcactttgggaggcccaggcgggaggatcacttgagcctgggagtttgagaacagcctagacaacatagtgagaccctatctatacaaaaataattttttttaaattagccacgtgtggtggtttgtgcctgtagtcctagctactcgggaggctgaggtgggaggattgcttaagcccaggaggttgaggctgcagtgagccatgatcgcaccactgcactccagcctgggtgacagagcaagaccttgactcaccaaaaaaaaaaaaaaaaaaaagagagagaaattaaaaatactgtaatctcagctgggcatgggggttcacacctgcagtcctagcactttgggaggctgaagcaggaggatcacttgaggccaggaactcaagaccagcctggcaacatagcaagaccccactacacacacacacacacacacacacaaagaagagaaagaaaaaaacgaaacaaaactgtaatctctgcagctgtcctcagtgtggagggggtagccctgtctgttccccttcagcacttgctgttttgactctctgggttctttgtgcaggtcttgatggggagtctctggtttgccattctttgtttgatttaactttctgtaatcataaagccaatgatgggctttttttttttttttttttttagactaagtcttgctctatcacccaagctggagtgcagtggcaccatctcggctcactgcaacctccacctcccggttcaagcaattctcctgcctcagcctcccgagtagctgggattatgggcttgtgccaccatgcccagctgatttttgtattttttgtagagaaagggtttcgccatgttggccaggctggcctcgaactcctgacctcaggtgatctgcccacttcagcctcccaaagtgctgggattacaggcgtgagccactgtgcctggcctaatgatgggctctttaatgtgatcctttagggttggcgccttgccctagttgctgttgaaaaaactatttttgtccaaatagcacacacacagaaacctaccaacttccctcccactttttcctaggaattccttctgagggatttcttgagatggggcagaatggggcttggaagagggagttggagctaattgaccgttgcctttctcctttgttggggtcctgagtcttgttcctgctgtaagagttactcacttcctgtctgccacctatctccctttgcatgtgtgcttcagttgggagatctgtttatcagcccctgccacacggctctttgttccttctgcagaggacgttggggtcccacggctggtccttttgactcattttgctttcaaggtcccacctcccagtctgaggctgcatcctccattaccatcgcccttcctgtgggctgggaggccaggtcctttcctgcccagcgatgtcagcgtttcctcaggggccaggcactcatcaggagaaaggaactaattacttgagtaatttgccttgccttgctgagaggagtgtgccctgagggactccatgtgagtgtggtgacgggtgtgggggtgtccctgtgttattttaaaatgggtgccttcaggacgatgagcatgtgaccatttcctctctatttccatcacaagagtattatggtatgagggtctcaggttagattatcctcccaagactcttctctcttccttctctactggaagcccacatagcatttccttatggcttgagggagaggttcggagccacttacaaattagataaagtacatttacaatcttgtacaaagccacacaatgaagtcatttttctcagctttttttttttttttttttttttttttgagcctgagtctcgctctatcgtccagactggagtgcagtggcgcgatcttgcttcactgaaacctctgcctcccaggttcaagagattctcatacctcagcctcctgagtagctgggattacagacatgcaccactatgcctggctaatttttggatttttagtagagaccgggtttcaccctgttggccaggctggtctcgaacccctgacctcaagtgatcttcccgcctgggcctcccaaagtgctgggattataggtgtgagccacagtgcccagccttgtttttgtttttgttttgttttgacagtctgtcactctgtcacccaggctggagtgcagtggtgcgatctcacctcacttcagcctctgcctcccaggttcaagtgattctcctgtctcagcctcctgagtagctgggattacaggcgtgccaccacgcccagctatttttgtaatttcattaaagacagggtttccccatgttggtgaggctggtcttgaactcctggcctcaagtgatccacctgcttcagcctcccaaagtgcagggattacaggcatgagccactgtgcctggcctcagctatcttgaatgctggagaattaaatccttttctgtctagggtgtcagctccctaagggctgggccaaaacagttggatttataagacactagagtcttgcctcagtagctcctttgaattctgcactgaattgatcagtttcttggcccaaagtaaactcagatggcagcccaagagccactctgcagtgccttctttcacatggtcatcatgctctctgatccctcaggttctgtctaagcctcatgttttatgaccgtgctgttctcagcccacctcaccctgccccatgccttctcaatggtttgttcacctgaattccccagatttcatgccagtatccccaaggttccttgacctcttggtgtaagcattcagcatctaaaattcattttattcccgtcaacgcatttctaactgtagaacaagaattataaatgacaaagctcatagaaaattggcaccttgtcttccccctccctcttattttatacataaaagagaatatgggctgggcattgtggccaaggctgggcatgatagctcatacttgtaatccagcactttgggagggtgaggcagatggatcacctgaggtcaggagttcaagaccagcctggccaacatggtgaaacctcatctctactaaaattacaaaaaaaaaattagctaggcatggtggcagatgcctgtaatccagctactcaggaggctgatgaaggagaatcacttgaaccctggaggcagaggttgtagagagccaagatggcgctactgcactccaacctgggcgaaagagagcaagactccgtctcaaaaaaaaaaaagacaaaaattagccaggcatggtggtgccacctgtagtcccagctgcttgggagcctaaggcaggagaatcgttttgacctgggagtaggaggttgcggtaaccgagattgtgccactgcacttgagcctgggcaacagagtgagactctgtctcaaaacaataagaacaacagcaacaaaagagagagaccatgccttgctccaggtctcttagctattgaagatgtacctggacccaggtctccggtcttctagttgaagcaattgtactgccttacaaagtcacattctctttggtgctttttgattgacgtatttatccaactagaaagttactcatgccctcatccaaaaatgtggtagaggccagattagtgctggtaggaataagagatataacctttggctttggaaccacaagcattagcagtctccatgttctttaaagacttggtgatattggtatttaggctggacaccatgcaaagactacacaggctcggttcctgcatgcagagaagttatctaagagatatgaccaggccggaatagaatgctcagaccacgtggaggctgttaaacttttacataatctagggaaagaagggacacaaggtggcattagtctagggtcaggtgggaaaaggttatgctgaaaagtctctgcagctcaggacagctttgtgcaaagaactgaagttcacagctgctagtgcctgggagatcaaatagtataaatgagggcagacaaccctgaggggcagatggagctttccagacaatcttggcatgaggatgagtgagtttcaaatcagtcctgccgaggcagatggcttcctccagctctgcttactgaatgcgaagtcacagtcagtaagaaaactggttttcttcttcccaggcgctgccccatacctgaagaccaagtttatctgtgtgacaccgtaagtggcttcctttccccgttttgccttcatttctaatatcctcagttatccctgggaatgggacactgggtgagagttaatctgccaaaggttggaagcccctgggctatgtttagtactcaaagtgaccttgtgtgtttaaaaagcttgagcttttatttttctgttggagaccagagtttgatggcttgtgtgtgtgtgttttgttcttttttttttttccattgtgtcttgtcaaccccccgtttcccctcctgctgccccccatttcctacagaacgacctgcagcaataccattgacctgccgatgtccccccgcactttagattcattgatgcagtttggaaataatggtgaaggtgctgaaccctcagcaggagggcagtttggtgagtatttggttgacagactttgtccctataagggaagttggtcccctttgtgtgatgctctcacatgtacacaccgagagctggtcactcggaatggtaggagattctagagctttgctttccaaaagagatggtatgaatgccacatgtgtgagtataaatcttctagcagccacactggaaatagacgaacttaatttttacaatatattttatttaacccactaaatccaacatactctcaatttaacatttcagaaaaagttgaggctgggtgagtggctcatgcctgtaatcccagcactttgggaggccgaggtgggtggatcacttgaggtcaggagttcgagaccagtctgaccaaaatctctaaaatataaaaattagctgggcatggtggcgcatacctgtaatcccagctactcaagaagctgaggtgggaggatcgcttgagcctgggaggtggaggttgcagtgagcagagatcgtgccactgcactccagcctgggcgacagagtgagactccatctcaaataaacaaaactaaactaaaaagaaaaagttgagacctttttttattcttttttttcatactaagcctttaaaatccagtgggcttttgacagccacagcacagctcagtttggacaaaccaaatctcaaatgcttggtggccacgtgtgtctcggggctcctgaattaaacagtagatcaagggcagaagatctcaggacagccttagagcttctgtaaacatggagctctgggaatcagttaaggtgggaatgagaaaggacccttcccgaggcagggtcctccagggaggagggtaaatctggcttttctgaccatccctgggccttaaggggcaggagattggatagcagtggtagcctgggccctgtcctctgaagggctgggggcgtggcctgccagttgcagagggtggacaactgaactagttttccctgtctgtccctccagagtccctcacctttgacatggagttgacctcggagtgcgctacctcccccatgtgaggagctgagaacggaagctgcagaaagatacgactgaggcgcctacctgcattctgccacccctcacacagccaaaccccagatcatctgaaactactaactttgtggttccagattttttttaatctcctacttctgctatctttgagcaatctgggcacttttaaaaatagagaaatgagtgaatgtgggtgatctgcttttatctaaatgcaaataaggatgtgttctctgagacccatgatcaggggatgtggcggggggtggctagagggagaaaaaggaaatgtcttgtgttgttttgttcccctgccctcctttctcagcagctttttgttattgttgttgttgttcttagacaagtgcctcctggtgcctgcggcatccttctgcctgtttctgtaagcaaatgccacaggccacctatagctacatactcctggcattgcactttttaaccttgctgacatccaaatagaagataggactatctaagccctaggtttctttttaaattaagaaataataacaattaaagggcaaaaaacactgtatcagcatagcctttctgtatttaagaaacttaagcagccgggcatggtggctcacgcctgtaatcccagcactttgggaggccgaggcggatcataaggtcaggagatcaagaccatcctggctaacacggtgaaaccccgtctctactaaaagtacaaaaaattagctgggtgtggtggtgggcgcctgtagtcccagctactcgggaggctgaggcaggagaatcgcttgaacctgagaggcggaggttgcagtgagccaaaattgcaccactgcacactgcactccatcctgggcgacagtctgagactctgtctcaaaaaaaaaaaaaaaaaaaagaaacttcagttaacagcctccttggtgctttaagcattcagcttccttcaggctggtaatttatataatccctgaaacgggcttcaggtcaaacccttaagacatctgaagctgcaacctggcctttggtgttgaaataggaaggtttaaggagaatctaagcattttagacttttttttataaatagacttattttcctttgtaatgtattggccttttagtgagtaaggctgggcagagggtgcttacaaccttgactccctttctccctggacttgatctgctgtttcagaggctaggttgtttctgtgggtgccttatcagggctgggatacttctgattctggcttccttcctgccccaccctcccgaccccagtccccctgatcctgctagaggcatgtctccttgcgtgtctaaaggtccctcatcctgtttgttttaggaatcctggtctcaggacctcatggaagaagagggggagagagttacaggttggacatgatgcacactatggggccccagcgacgtgtctggttgagctcagggaatatggttcttagccagtttcttggtgatatccagtggcacttgtaatggcgtcttcattcagttcatgcagggcaaaggcttactgataaacttgagtctgccctcgtatgagggtgtatacctggcctccctctgaggctggtgactcctccctgctggggccccacaggtgaggcagaacagctagagggcctccccgcctgcccgccttggctggctagctcgcctctcctgtgcgtatgggaacacctagcacgtgctggatgggctgcctctgactcagaggcatggccggatttggcaactcaaaaccaccttgcctcagctgatcagagtttctgtggaattctgtttgttaaatcaaattagctggtctctgaattaagggggagacgaccttctctaagatgaacagggttcgccccagtcctcctgcctggagacagttgatgtgtcatgcagagctcttacttctccagcaacactcttcagtacataataagcttaactgataaacagaatatttagaaaggtgagacttgggcttaccattgggtttaaatcatagggacctagggcgagggttcagggcttctctggagcagatattgtcaagttcatggccttaggtagcatgtatctggtcttaactctgattgtagcaaaagttctgagaggagctgagccctgttgtggcccattaaagaacagggtcctcaggccctgcccgcttcctgtccactgccccctccccatccccagcccagccgagggaatcccgtgggttgcttacctacctataaggtggtttataagctgctgtcctggccactgcattcaaattccaatgtgtacttcatagtgtaaaaatttatattattgtgaggttttttgtcttttttttttttttttttttttggtatattgctgtatctactttaacttccagaaataaacgttatataggaaccgt

SEQ ID NO: 42 - protein, 770 aa, Artificial Sequence
  STAT3 Amino Acid Sequence
MAQWNQLQQLDTRYLEQLHQLYSDSFPMELRQFLAPWIESQDWAYAASKESHATLVFHNLLGEIDQQYSRFLQESNVLYQHNLRRIKQFLQSRYLEKPMEIARIVARCLWEESRLLQTAATAAQQGGQANHPTAAVVTEKQQMLEQHLQDVRKRVQDLEQKMKVVENLQDDFDFNYKTLKSQGDMQDLNGNNQSVTRQKMQQLEQMLTALDQMRRSIVSELAGLLSAMEYVQKTLTDEELADWKRRQQIACIGGPPNICLDRLENWITSLAESQLQTRQQIKKLEELQQKVSYKGDPIVQHRPMLEERIVELFRNLMKSAFVVERQPCMPMHPDRPLVIKTGVQFTTKVRLLVKFPELNYQLKIKVCIDKDSGDVAALRGSRKFNILGTNTKVMNMEESNNGSLSAEFKHLTLREQRCGNGGRANCDASLIVTEELHLITFETEVYHQGLKIDLETHSLPVVVISNICQMPNAWASILWYNMLTNNPKNVNFFTKPPIGTWDQVAEVLSWQFSSTTKRGLSIEQLTTLAEKLLGPGVNYSGCQITWAKFCKENMAGKGFSFWVWLDNIIDLVKKYILALWNEGYIMGFISKERERAILSTKPPGTFLLRFSESSKEGGVTFTWVEKDISGKTQIQSVEPYTKQQLNNMSFAEIIMGYKIMDATNILVSPLVYLYPDIPKEEAFGKYCRPESQEHPEADPGSAAPYLKTKFICVTPTTCSNTIDLPMSPRTLDSLMQFGNNGEGAEPSAGGQFESLTFDMELTSECATSPM

SEQ ID NO: 43 - DNA, 4953 bp, Artificial Sequence
  Synthetic
ggtttccggagctgcggcggcgcagactgggagggggagccgggggttccgacgtcgcagccgagggaacaagccccaaccggatcctggacaggcaccccggcttggcgctgtctctccccctcggctcggagaggcccttcggcctgagggagcctcgccgcccgtccccggcacacgcgcagccccggcctctcggcctctgccggagaaacaggatggcccaatggaatcagctacagcagcttgacacacggtacctggagcagctccatcagctctacagtgacagcttcccaatggagctgcggcagtttctggccccttggattgagagtcaagattgggcatatgcggccagcaaagaatcacatgccactttggtgtttcataatctcctgggagagattgaccagcagtatagccgcttcctgcaagagtcgaatgttctctatcagcacaatctacgaagaatcaagcagtttcttcagagcaggtatcttgagaagccaatggagattgcccggattgtggcccggtgcctgtgggaagaatcacgccttctacagactgcagccactgcggcccagcaagggggccaggccaaccaccccacagcagccgtggtgacggagaagcagcagatgctggagcagcaccttcaggatgtccggaagagagtgcaggatctagaacagaaaatgaaagtggtagagaatctccaggatgactttgatttcaactataaaaccctcaagagtcaaggagacatgcaagatctgaatggaaacaaccagtcagtgaccaggcagaagatgcagcagctggaacagatgctcactgcgctggaccagatgcggagaagcatcgtgagtgagctggcggggcttttgtcagcgatggagtacgtgcagaaaactctcacggacgaggagctggctgactggaagaggcggcaacagattgcctgcattggaggcccgcccaacatctgcctagatcggctagaaaactggataacgtcattagcagaatctcaacttcagacccgtcaacaaattaagaaactggaggagttgcagcaaaaagtttcctacaaaggggaccccattgtacagcaccggccgatgctggaggagagaatcgtggagctgtttagaaacttaatgaaaagtgcctttgtggtggagcggcagccctgcatgcccatgcatcctgaccggcccctcgtcatcaagaccggcgtccagttcactactaaagtcaggttgctggtcaaattccctgagttgaattatcagcttaaaattaaagtgtgcattgacaaagactctggggacgttgcagctctcagaggatcccggaaatttaacattctgggcacaaacacaaaagtgatgaacatggaagaatccaacaacggcagcctctctgcagaattcaaacacttgaccctgagggagcagagatgtgggaatgggggccgagccaattgtgatgcttccctgattgtgactgaggagctgcacctgatcacctttgagaccgaggtgtatcaccaaggcctcaagattgacctagagacccactccttgccagttgtggtgatctccaacatctgtcagatgccaaatgcctgggcgtccatcctgtggtacaacatgctgaccaacaatcccaagaatgtaaacttttttaccaagcccccaattggaacctgggatcaagtggccgaggtcctgagctggcagttctcctccaccaccaagcgaggactgagcatcgagcagctgactacactggcagagaaactcttgggacctggtgtgaattattcagggtgtcagatcacatgggctaaattttgcaaagaaaacatggctggcaagggcttctccttctgggtctggctggacaatatcattgaccttgtgaaaaagtacatcctggccctttggaacgaagggtacatcatgggctttatcagtaaggagcgggagcgggccatcttgagcactaagcctccaggcaccttcctgctaagattcagtgaaagcagcaaagaaggaggcgtcactttcacttgggtggagaaggacatcagcggtaagacccagatccagtccgtggaaccatacacaaagcagcagctgaacaacatgtcatttgctgaaatcatcatgggctataagatcatggatgctaccaatatcctggtgtctccactggtctatctctatcctgacattcccaaggaggaggcattcggaaagtattgtcggccagagagccaggagcatcctgaagctgacccaggcgctgccccatacctgaagaccaagtttatctgtgtgacaccaacgacctgcagcaataccattgacctgccgatgtccccccgcactttagattcattgatgcagtttggaaataatggtgaaggtgctgaaccctcagcaggagggcagtttgagtccctcacctttgacatggagttgacctcggagtgcgctacctcccccatgtgaggagctgagaacggaagctgcagaaagatacgactgaggcgcctacctgcattctgccacccctcacacagccaaaccccagatcatctgaaactactaactttgtggttccagattttttttaatctcctacttctgctatctttgagcaatctgggcacttttaaaaatagagaaatgagtgaatgtgggtgatctgcttttatctaaatgcaaataaggatgtgttctctgagacccatgatcaggggatgtggcggggggtggctagagggagaaaaaggaaatgtcttgtgttgttttgttcccctgccctcctttctcagcagctttttgttattgttgttgttgttcttagacaagtgcctcctggtgcctgcggcatccttctgcctgtttctgtaagcaaatgccacaggccacctatagctacatactcctggcattgcactttttaaccttgctgacatccaaatagaagataggactatctaagccctaggtttctttttaaattaagaaataataacaattaaagggcaaaaaacactgtatcagcatagcctttctgtatttaagaaacttaagcagccgggcatggtggctcacgcctgtaatcccagcactttgggaggccgaggcggatcataaggtcaggagatcaagaccatcctggctaacacggtgaaaccccgtctctactaaaagtacaaaaaattagctgggtgtggtggtgggcgcctgtagtcccagctactcgggaggctgaggcaggagaatcgcttgaacctgagaggcggaggttgcagtgagccaaaattgcaccactgcacactgcactccatcctgggcgacagtctgagactctgtctcaaaaaaaaaaaaaaaaaaaagaaacttcagttaacagcctccttggtgctttaagcattcagcttccttcaggctggtaatttatataatccctgaaacgggcttcaggtcaaacccttaagacatctgaagctgcaacctggcctttggtgttgaaataggaaggtttaaggagaatctaagcattttagacttttttttataaatagacttattttcctttgtaatgtattggccttttagtgagtaaggctgggcagagggtgcttacaaccttgactccctttctccctggacttgatctgctgtttcagaggctaggttgtttctgtgggtgccttatcagggctgggatacttctgattctggcttccttcctgccccaccctcccgaccccagtccccctgatcctgctagaggcatgtctccttgcgtgtctaaaggtccctcatcctgtttgttttaggaatcctggtctcaggacctcatggaagaagagggggagagagttacaggttggacatgatgcacactatggggccccagcgacgtgtctggttgagctcagggaatatggttcttagccagtttcttggtgatatccagtggcacttgtaatggcgtcttcattcagttcatgcagggcaaaggcttactgataaacttgagtctgccctcgtatgagggtgtatacctggcctccctctgaggctggtgactcctccctgctggggccccacaggtgaggcagaacagctagagggcctccccgcctgcccgccttggctggctagctcgcctctcctgtgcgtatgggaacacctagcacgtgctggatgggctgcctctgactcagaggcatggccggatttggcaactcaaaaccaccttgcctcagctgatcagagtttctgtggaattctgtttgttaaatcaaattagctggtctctgaattaagggggagacgaccttctctaagatgaacagggttcgccccagtcctcctgcctggagacagttgatgtgtcatgcagagctcttacttctccagcaacactcttcagtacataataagcttaactgataaacagaatatttagaaaggtgagacttgggcttaccattgggtttaaatcatagggacctagggcgagggttcagggcttctctggagcagatattgtcaagttcatggccttaggtagcatgtatctggtcttaactctgattgtagcaaaagttctgagaggagctgagccctgttgtggcccattaaagaacagggtcctcaggccctgcccgcttcctgtccactgccccctccccatccccagcccagccgagggaatcccgtgggttgcttacctacctataaggtggtttataagctgctgtcctggccactgcattcaaattccaatgtgtacttcatagtgtaaaaatttatattattgtgaggttttttgtcttttttttttttttttttttttggtatattgctgtatctactttaacttccagaaataaacgttatataggaaccgtaaaaa

SEQ ID NO: 44-50 - skipped (7 entries)

SEQ ID NO: 51 - DNA, 19438 bp, Artificial Sequence
  NRas Genomic Sequence
aaaaaaaaaagtcaggtgtggtggctcacacctgtaaacccaacacttcgggaggccaaggtgggcagatcacttgagcccaggagtttgagaccagcctgggcaacatggcaaaaccctgtctctacaaaaaatgcaaaaattagccagtcatggtgtgtgcctgtagtcccagcgactcaggagctgaggtgggaggatcacccgagcccaggaaatcaaggctgcagtgagccgttgatcgccactgcactccagcctgggtagcagagcgagaccctgtctcaacaataacaatgacaaaaattcttcacttaccctgtaatcatcaagaggatggttagaagcttctgcttcccacctgtttttctcatgttttccactattgttgactgagtacatttgcctggatgctgaaaattgttaggcagctgaattctttggcatagtttttatctgtagcctgcaccgggctccaggcaacttcatactgtagggcagggctcagcatatatggtggccttttcttgtgatcacagccacaaccatttgtttacatattgtttttcgttgctttctcactacaacagcagagttggttagacaggatgacttgcaaacctaaaataatactctccggccctttaggaaaatggtttttggtctctgatctggaaaaaggaacctatgtgagggagccagaattcgaacaaaaaaaaaggaggtggggtgtcaaatttatctaaattgtttttgcctgtgcccgcctagttgtttactggctcattgagtatgggacaaaagtatttttggttggctcatattgtgaacttgggaagaagatagtcctgtgaatattggcaacccatagtgcttaaaatttaggcaatgggattgtaaatgacagtattttttgttttaatttataaatgcagtttaaaattgttcatcagctaataaagtactgatgggagctgtgacattctcatttggttccatggtagtatttaacatttaggatttcatttaagctttaaggtgaaacttctgagtactgaaaatgtaaatatattttaagtaacataacacatttttagcagttatataaacttcctagggtcatcagcagaggactgttgtgaaatactagcttttagactttgtacctgttttacaggcgatatgaaaggtgaggtctatccatttggcatcgttgggatggccaacaaaggggattgcctgcagaaaggggagagcgtcaagttccaattgtgtgtcctgggccaaaatgcacaaactatggcttacaacatcacacccctgcgcagggccacagtggaatgtgtgaaagatcaggtaagtgccagcatctctgtatctgaatttgatccttctatgagttggtaaccaaaaccttcaaatattttcagccaaggggaaatcatcaacattcattcgtttttttatttctacttcaccttttttcagtcatttgaggtagcttaataaaaacagaaaactacacaaaaagtgactatattagcaatgagaaagtaagattggtattagtaactaatattatgcaatggggaaaataagttaggggtgagatttccagaatagaaggactatatggttttgtacacttttgcttagagcttcttttgcatatcacacaaacacagaaaccacgttcaaaagtacttaaaaaataagcttagggcaaacaaacttagtcttactcctgagatctcagggaaatctgagtcctcagaatgtttttcatcagtacagagaataataacattttgtatggctgctactataacccagcttaattctagaggggatccaaacaatatatatgttgaagtaacagcttcctgatgagtttgcttaattcaaaaagcttagttcataatatacgaaggaacaaggcaagttttatttgtttggttcaagtttgtgatatagtgaatggcactttcagagatacatttcttccctgacaggttttgccacaggcagctggactggagtatcaacattaataccatgttttatacatccttttagataggggcaggcattgtgcttcattcagagtgaggtgtggcatgccctctcttttttacctacttttttttttcagtttggcttcattaactatgaagtaggagatagcaagaagctctttttccatgtgaaagaagttcaggatggcattgagctacaggcaggagatgaggtggagttctcagtgattcttaatcagcgcactggcaagtgcagcgcctgtaatgtttggcgagtctggtgagttttgttgttgtggtttgattagtaactaccctggagtgtctcaactttatagtctctgttttgtcacatcacttttctgtgccttgtcttctgccacttattatttcttgatacttcctacttctagttgaatacaaaaagattgtttagtacatgttttttaaaatttttgccaaattcttcttcttccattaagtcatttctaggttatatgctacttaaaattctaatagtttagccatgctgattcataatgccgctttgcttccccagagacagtctcacagtctgattcggttacccaggcgctatcacgactcactgcagactcaaccccctgggcctaagcaattctcccacgtcagcttccccagtagctgggactacaagcatgcgccaccacatgcagccaattttattttttgtagagacatggtcccactgttttgcccaggctgatctcgaacttctgggctcaagtgttcctcctgccctgtcctctcaaagcgctgggattacaggtgttagctaccacatctgctaccttgtttttttatgcatctgtggaactggtcactcttgattgcattcaagtctagggtctgcaaatgattccttccattcctattaagttgggaccttgagttggggataataatacataaacaaacttgtctgtcctgtctttctagctaggtatatgaggcaagagtcccatcataaaaagtgagtcatttgggcagttaggtggaaaacacactcctttgcaagtgcttgctgtctgcccaccaagtgtggtttcttctcatcttttgacttaattacagtgagggccccaaggctgttgcagctcctcgacctgatcggttggtcaatcgcttgaagaatatcactctggatgatgccagtgctcctcgcctaatggttcttcgtcagccaaggggaccagataactcaatggtatgagggcatacaaggcttgggggaggccaactgatagaccaacataaaatatgtggtcctatttaaacaataggtcaggaaacttaatgaagcagggagacttccatattgcttataactagttaggactttctacacattggttcagccccctaacctaatggttgcttacagtaagaagcacatttcttttcttgatgctttgaagacagtttaggtaatgaatgggtcaggagtgcttactgtggattttctcctctaggaaagaattagtactgcataagatgattaaaaataatgcttttgtagtttcatttcggaatagtgaatgtactatgattgttgtgcgctcaaatcattaactgcagggttttttttttctcccccccacaggggtttggtgcagaaagaaagatccgtcaagctggtgtcattgactaaccacatccacaaagcacaccattaatccactatgatcaagttggggggaatctggtgaagggttctgaatatctccctcttcatccctcccgaaatctggaatacttattctattgagctattacaccagttttaacaccttcctcgtgttatgtttaaaaaaataaataaatttaagaaaaccattttaaataatgcacagttgcagcctggaaaaacttaaggtggcgccttatagtatcaattttaggagctttatttggtgcatttaacgcaactggtaattgcagaatccactttgcctgtgtaagtgaaaaatatagactgttatcttgttggccctatgaaattctgcacttttcattatatactctaccttcattaattacttctggcaagatgttctgccttagcactcagttgcattcttttcctttttcttcctgttcattatgctttaattctgaggaccatatgagggtagaatatattatcttttaaaaattacaaaaatttgtataggcaaaccatttcttaaagttgatggccaaattttaaaatgttatttttcatatcatttataatcttgtcacaatccacttaaagaagtttggttatatttcagtgaaaattttcttccagagtaggttttttttcgtgggttggggggtaactttactacaattagtaagtatggtgcagaatttcatgcaaatgaggagtgccagcagtgtgataatttaaacatatttaaacaaaaacaaaaaaaatgaatgcacaaacttgctgctgcttagatcactgcagcttctaggacccggtttcttttactgatttaaaaacaaaacaaaaaaaaataaaaaagttgtgcctgaaatgaatcttgtttttttttataagtagccgcctggttactgtgtcctgtaaaatacagacacttgacccttggtgtagcttctgttcaactttatatcacgggaatggatgggtctgatttcttggccctcttcttgaattggccatatacagggtccctggccagtggactgaaggctttgtctaagatgacaagggtcagctcaggggatgtgggggagggcggttttatcttcccccttgtcgtttgaggttttgatctctgggtaaagaggccgtttatctttgtaaacacgaaacatttttgctttctccagttttctgttaatggcgaaagaatggaagcgaataaagttttactgatttttgagacactagcacctagcgctttcattattgaaacgtcccgtgtgggaggggcgggtctgggtgcggcctgccgcatgactcgtggttcggaggcccacgtggccggggcggggactcaggcgcctggggcgccgactgattacgtagcgggcggggccggaagtgccgctccttggtgggggctgttcatggcggttccggggtctccaacatttttcccggctgtggtcctaaatctgtccaaagcagaggcagtggagcttgaggtaagtttatctcatgcatagtgttcggctttgggctgtggaatgttcaggcgtttcactgatgccagaaatggagcagaatctatcagctggagacaaaggccttgggcgggggtccttccatttggtgcctacgtggggagatctttggagacagaagggagaatgggaaggagttgcggcctggaggcttcctgctagagctgagaagccttcggggagtaataggaagggggatttccattgcttaggctgagggcggggcccaaggactgttgaaaaatagctaaggatgggggttgctagaaaactactccagaagtgtgaggccgatattaatccggtgtttttgcgttctctagtcactttaagaaccaaatggaaggtcacactagggttttcatttccattgattatagaaagctttaaagtactgtagatgtggctcgccaattaaccctgattactggtttccaacaggttcttgctggtgtgaaatgactgagtacaaactggtggtggttggagcaggtggtgttgggaaaagcgcactgacaatccagctaatccagaaccactttgtagatgaatatgatcccaccatagaggtgaggcccagtggtagcccgctgacctgatcctgtctctcacttgtcggatcatctttacccatattctgtattaaaggaataagaggagagaaagtaaaaagttattttgggtatacattcagttatgcaataagcttaacgtgtttatagagaacagttcatttttattagctgctgaagtttctaaaacctgtccagtttttaacagttctgtaaactattgcaaactcagtgttgagttcattcatgagtttcttcatatataacagctctattacatgagaaacacaggccatagtagcgagactgtctgattgtatgggagataataggatggagataaaggattcagagatgagtgttcttcaatatttatttattagctagttgaagcagctgagaccagatgattggagtagcaagaacttgagatttttagtctttatgcctaggattttggtccctgtttgcagtttatttagttgtgtgatattgagcaactgaatctctcccaacctcattttcctcatgttttaaattaccataaacttgtcctgcctaccacacagggatgttatggaaagttaaataatatatttaagttatttatgaatggtaaagcactatgtaatagtacttagggattctattgttattatgagagttcatggtacagattgtcttcagtaagtggcacctaaggctctttaaataaagggttttgccggacacggtggctcacgcctgtaatcccagcactttgggaggctgaggcaggcggatcacaaggtcaggagttcaagaccagcctgatcaacatggtgaaaccccgtctctactaaaaatacaaaaattagctgggtgtggtggcaggcacctgtaatcccagctactcaggaggctgaggcaggagaatcgcttgaaccagaggcagagggtgcagtgagccgagatcacaccacagacctccagcctgggcaacagagcgagacttcgtctcaaaaaataaataaatagataaataaataaagggttttgtaattttgttcagtttagaaatgcctaactttagagattattttaatcaacacctggcctccctaccatctggctactcgtgtttaattgatgaaaactaactctaatgtagccactataaaaaattggttgctaacccttggcaaaatctttattttgagcttaacagctttaatattttacatgaaatgtttaatattttaattaaatatttttaaatgtttgatttattgagcaatttacataagtaaaatacataaattttatgtctacagcccagtgctttttgcgtttctatatagtcatgtagctaccacccagataacagtatagagcacttccagtactccagagagttctccaagtgtgatgacattaaaatacaagtaaaagtcctgttgccataaaaccaaaatgaaagtattttttatatgatctatgcatgtttgtcttcctgagaaattaaacataactataccttgtttggaacctttaagaatttgattcaggaatatttcccaaaggtacatctgtcatgataaaaaaaaaaccttctctgaaacaaaggtatttgtatatttagtcataaacacaaatgatgtatatagggccaggttataattggtggaggtatgtttagatttctttaagtaaaataaacagcacaaataaaacagtccagttcatagcttagtgaaatacactgggtacttaatctgtagcctcctggctgcagtagagttgtcatttgagttactgtgttttcttaatcttttccaggaacacagtgaccatatttcttttctgcaggcatatagaatttggtgggttttcttttatgtagggtgatattggatactttttgtttgtgattatatattagcaatttgagggacaaaccagataggcagaaatgggcttgaatagttagatgcttatttaaccttggcaatagcattgcattccctgtggtttttaataaaaattgaacttccctccctccctgcccccttaccctccacacccccaggattcttacagaaaacaagtggttatagatggtgaaacctgtttgttggacatactggatacagctggacaagaagagtacagtgccatgagagaccaatacatgaggacaggcgaaggcttcctctgtgtatttgccatcaataatagcaagtcatttgcggatattaacctctacaggtactaggagcattattttctctgaaaggatgatctttgtgttctgaatctttatggggaaatgaggttaccacactagggaagatagagctttttaattatgggaagagttggttttaggttgtttgacattgagaatctagggtaattactgaaagttaatactggaatttattttacataatatactgttactataaagtttgataatacataagtgaagcttgctactgggaatgacttggaaccagagttgttgtaattagagatcacgaaggaatttcagagaggaaaacatctccaagaaacatctttcagtatgtaatggaaaagataggccaggcacagtggctcacacctggaatgtcagtgctttgggaggccaaggcgggaggatcactttcagcccaggagttggagaccagcctgggcaacagagcaagaccctgtctctacaaaaataaaaataaaaaaattagtcacacatggtggcagctactcgggaggcagaggtgggaggatcacgtgagctcaggaggtcgaggcatgctcactccactgcactgctgcactccagcctaatcaacagagcaagattctgtctccaaaaaaaataaaaaataaaatgataggagtaagcaaataggaagtccataaagatgaaaacaaagcaagggaacataaagatagactttgtccatagaaccataaagtttcaaagctagattggaccataaaaattctagtacaatattcttattttgcagaatcagaaacagagttcagaatgtcgtttgttaggttttggagtcaggattgttattagtagcagagccaggaccaaaaacccaaagctcctttttcttagcacagtgttcttaaacagaataatataatggttaagaatgagaactctgcctggattgaaacctagctctgtttattagcgacgtgactcaggggctatgtggctttcctaacctataatatggaaataataatacctacctcatagagttgtgaagattacagttttaataaatacgcaaatcactcagaatagtgcctggcacacagtaaatgctacttaagtgttctgcctaaaggcttgagtcttggcttattttctatccatgtgaagatgtctgctctcaaaagcagattggtccaacactgaattcaagtgttcttttcctaacctgttgtacttcccattttttttttgtctaaaagtaatagcagtacttaataaaatgcccacacttggcatgcatctaataaatgttttttgaatttctagaagtcatttttcttctttcttacaagaaatttattcatttttctatatgccttagctcaaaccaaagagtatttaaaacatcttatgaaaatgcatatagtagagcaagataagattaatgaaaaataggcttaagtgagaccaaaaaaataagggtaaaataaacaaatttaggagtgagcatattctgtgattgtgcatgaagttccagtggctttctaaaggtggactacaaatttggtcactgttgtgaaaaggaaagtagccagctgaaagattcagtatctgtatgctgaaagccgttaagttgctcggactagaaggaaattttcccatggatcctcaaagaggcttgtttaatgtaaaaatcagtagtaacctgacagtgacatggtccaggtactttaggctgtcttatcccttaatgtaggctattaccatcaagcacagttttgcaaatagccagtggaatgtagttcagatacatgactttgtgggtaatccaggggtagagactaaaacagtactgtgcagtatgtggttatttacagttaattaagattaaataaaatttaaaaattagttccttgactaccaaatgctcaatagccactagtaggtaccatgttgaacagtacagatatagaccatttccatcatcacataaagtactgttggattgtgttggtcaagacaatctaaagcaattgtttcccaggtgtgctgtgtggtgtgccttacatgtcattgaaaggggtgctgtcaggagttctagatgcttcagcctccctttactaagagcagttcttatgttttctattttatcgcttgggcttccagatacaatgttttgttttaggtttgttttttttgtttgtttgtttttttttttttgagacggagttttgctctggttgcccaagctggatggagtacggtggtgcgatcgcggctcactgcaacctccgcctcccgggttcgagagattctcctgcctcagcttcccgagtagctggaattacaggcgtccaccaccatgcctgactaattttttttgtatttttagtagacttggggtttcaccatgttggccgggctggtttcaaactcctgacctcaggtgatccacccgcctcggcctcccagagggctgggattacaggtgtgaaccaccgtgcccggcctgttttagttttttagagatggagtctccctctgttgcccaagccagagtgcggtggcatgacactctcagggttcaacctctcagggatcaagggatcctcccacctcagcttcctgagtagctggaaccacaggcacatgtgccaccatgcccagctaatttttgtattttttgtagaagcaaggtttcaccatgttgcccaggctggtctcggactcctaggtcaagtgatcctcccacctcaatctcctagagtgctaagactataggcgggagtcaccatgcccagcttcatctacaatttatttgaagaaaatgtttgagcaccacccatcttgaaaagtgatagactgccttccattaaatactgtcacacctagttatttagcagcagtgagcttcactttttatactttagaccttaatctaaagggtgatttctagttgccagttaaatccagagccaagctctttggagaatccaggagcctcactaggtcatgtatcaggataaaatacccatccactcccattagaaggtgagcttgtacttatggcttcctgatggctgctgcaacaagtctaaagcagtctccttagtatacaatgtcttctctaagtggtagaaaaaagcaaaaatactacaagttaatagggctacataaaatttgctagtttcttttttgccctagccatttattccttcctgaaatcttgtctctctctcgctctctctttctctcgctctcactttctttctctttttcttttctcttttcttttctttcttccctttcttttctttcttttttcctgttgcccaggctggagtgcagtggaacaattatggctcactgcagccttgacctttctggacccaggtgatcctcccacctcagtctcccaattagctgggactacaggcatgcgccaccacacccagctataatatatattgtatatatattttttatttataaatatatataaatatatatttatatgtgtaaattatatatatttatatattataaattatatataaatatatatttatatataatatatataatatatatttatttttatatattttatatatattttttggggggggttgggggggatggagtctcactctgtcgcccaggctagagtgtagtggcgtgatcttggctcactgcaatcttcgcctcccaggttcaagcgattctcctgcctcagcttcccgagtagctgggactataggcgcctgccaccacacctggctaatttttgtatttttagtagagatggggtttcaccatattggccaggctggtcttcaactcctgaccttgtgatctgcccacctcaacctcccaaagtgctgggaatacaggcatgagccactgcacccagcctaatctttgtatttttttgtagagaccgggttttgccatgttgcccaggctaatctcaaactcctgggttcaagcagtctgccctcctcagcctcccaaagtgctgagattgcaggcatgagccactgtacccagcctaatcttgtttttcttatgttctgataatatattcccgtttttagggagcagattaagcgagtaaaagactcggatgatgtacctatggtgctagtgggaaacaagtgtgatttgccaacaaggacagttgatacaaaacaagcccacgaactggccaagagttacgggattccattcattgaaacctcagccaagaccagacaggtatggtacagctttcagcatttgtgcaagagtttgcatcagttgattaactctggtagagatgtgatccatattcatattctttgttgttatgcatttttttcatttttatttttttattttttatttttttttaggcagagtctcactctatcttctaagctggagtgcagtggtgtgatctcagctcactgcagcctctgtctcttgggttcaagtgattctcctgcctcagcctcccaagtagctgggactacgggcacatcatcatgcccggctaatttttgtacttttagtagagacagggttttaccatgttgcccaggctggtctcgaactcctggcctcaagcaatcctcccacctgggcctcccagagtgctgggattacaggtgtgagccaccacgcccagcctgttgttaggcatttttagtagtgttctttttcttaacgcttgtttaaacccaaaatgaacttactaatattctgttatggcatgtttactcctgcattaacatccacaaatatttcttgggaagatccttgactaaaaatatttataaacattagttatttctctgtcaacaccagcccgtttatggcttaagcctcctgaatggagtctttagtttaatgtagttttgttccgtgtttctcacattacccttttcctttgcatgaatgtttatttggcaaaatgtgccatttttatatcagcctgttcttgtgattcaataggaatgtgaaatttagtgttctcttccttaaatcaccatattttattttatcagctattcgtttagtaattggaatcttatgtccacataaagagatacaaatgcaagagagcttataatttggattgtgtccgttgagctagctctctcattttttttcattttttccttttatagggtgttgaagatgctttttacacactggtaagagaaatacgccagtaccgaatgaaaaaactcaacagcagtgatgatgggactcagggttgtatgggattgccatgtgtggtgatgtaacaaggtgagcatatggtttcttggcataattacaaatcttagtatatagtattgggcaatttggaggagtgctggtgttattgtctatatgttttttgagtttctgcctatcctcttctgcacattttccatatgacaccctttctgaaagtactgaggtctaaagtgtttaaaacatttgattattccacaggtatctttatatttttggtaacattagaaattataagacattatttatgaaatgtaggcataccctattcctggcaatgaccaggaatttgaaggatcactactttgaaactagttaataaggacatggtttctgttctttttttacagatacttttaaagttttgtcagaaaagagccactttcaaggtaggacaagtttggaaatgtattctcattcctgttaattttgtatatttgtttttcttatactctgaatgtgtcacttatacaaattctgtttctatttcagctgcactgacaccctggtcctgacttccctggaggagaagtattcctgttgctgtcttcagtctcacagagaagctcctgctacttccccagctctcagtagtttagtacaataatctctatttgagaagttctcagaataactacctcctcacttggctgtctgaccagagaatgcacctcttgttactccctgttatttttctgccctgggttcttccacagcacaaacacacctctgccaccccaggtttttcatctgaaaagcagttcatgtctgaaacagagaaccaaaccgcaaacgtgaaattctattgaaaacagtgtcttgagctctaaagtagcaactgctggtgattttttttttctttttactgttgaacttagaactatgctaatttttggagaaatgtcataaattactgttttgccaagaatatagttattattgctgtttggtttgtttataatgttatcggctctattctctaaactggcatctgctctagattcataaatacaaaaatgaatactgaattttgagtctatcctagtcttcacaactttgacgtaattaaatccaactttcacagtgaagtgcctttttcctagaagtggtttgtagacttcctttataatatttcagtggaatagatgtctcaaaaatccttatgcatgaaatgaatgtctgagatacgtctgtgacttatctaccattgaaggaaagctatatctatttgagagcagatgccattttgtacatgtatgaaattggttttccagaggcctgttttggggctttcccaggagaaagatgaaactgaaagcacatgaataatttcacttaataatttttacctaatctccacttttttcataggttactacctatacaatgtatgtaatttgtttcccctagcttactgataaacctaatattcaatgaacttccatttgtattcaaatttgtgtcataccagaaagctctacatttgcagatgttcaaatattgtaaaactttggtgcattgttatttaatagctgtgatcagtgattttcaaacctcaaatatagtatattaacaaattacattttcactgtatatcatggtatcttaatgatgtatataattgccttcaatccccttctcaccccaccctctacagcttcccccacagcaataggggcttgattatttcagttgagtaaagcatggtgctaatggaccagggtcacagtttcaaaacttgaacaatccagttagcatcacagagaaagaaattcttctgcatttgctcattgcaccagtaactccagctagtaattttgctaggtagctgcagttagccctgcaaggaaagaagaggtcagttagcacaaaccctttaccatgactggaaaactcagtatcacgtatttaaacatttttttttcttttagccatgtagaaactctaaattaagccaatattctcatttgagaatgaggatgtctcagctgagaaacgttttaaattctctttattcataatgttctttgaagggtttaaaacaagatgttgataaatctaagctgatgagtttgctcaaaacaggaagttgaaattgttgagacaggaatggaaaatataattaattgatacctatgaggatttggaggcttggcattttaatttgcagataataccctggtaattctcatgaaaaatagacttggataacttttgataaaagactaattccaaaatggccactttgttcctgtctttaatatctaaatacttactgaggtcctccatcttctatattatgaattttcatttattaagcaaatgtcatattaccttgaaattcagaagagaagaaacatatactgtgtccagagtataatgaacctgcagagttgtgcttcttactgctaattctgggagctttcacagtactgtcatcatttgtaaatggaaattctgcttttctgtttctgctccttctggagcagtgctactctgtaattttcctgaggcttatcacctcagtcatttcttttttaaatgtctgtgactggcagtgattctttttcttaaaaatctattaaatttgatgtcaaattagggagaaagatagttactcatcttgggctcttgtgccaatagcccttgtatgtatgtacttagagttttccaagtatgttctaagcacagaagtttctaaatggggccaaaattcagacttgagtatgttctttgaataccttaagaagttacaattagccgggcatggtggcccgtgcctgtagtcccagctacttgagaggctgaggcaggagaatcacttcaacccaggaggtggaggttacagtgagcagagatcgtgccactgcactccagcctgggtgacaagagagacttgtctccaaaaaaaaagttacacctaggtgtgaattttggcacaaaggagtgacaaacttatagttaaaagctgaataacttcagtgtggtataaaacgtggtttttaggctatgtttgtgattgctgaaaagaattctagtttacctcaaaatccttctctttccccaaattaagtgcctggccagctgtcataaattacatattccttttggtttttttaaaggttacatgttcaagagtgaaaataagatgttctgtctgaaggctaccatgccggatctgtaaatgaacctgttaaatgctgtatttgctccaacggcttactatagaatgttacttaatacaatatcatacttattacaatttttactataggagtgtaataggtaaaattaatctctattttagtgggcccatgtttagtctttcaccatcctttaaactgctgtgaatttttttgtcatgacttgaaagcaaggatagagaaacactttagagatatgtggggtttttttaccattccagagcttgtgagcataatcatatttgctttatatttatagtcatgaactcctaagttggcagctacaaccaagaaccaaaaaatggtgcgttctgcttcttgtaattcatctctgctaataaattataagaagcaaggaaaattagggaaaatattttatttggatggtttctataaacaagggactataattcttgtacattatttttcatctttgctgtttctttgagcagtctaatgtgccacacaattatctaaggtatttgttttctataagaattgttttaaaagtattcttgttaccagagtagttgtattatatttcaaaacgtaagatgatttttaaaagcctgagtactgacctaagatggaattgtatgaactctgctctggagggaggggaggatgtccgtggaagttgtaagacttttatttttttgtgccatcaaatataggtaaaaataattgtgcaattctgctgtttaaacaggaactattggcctccttggccctaaatggaagggccgatattttaagttgattattttattgtaaattaatccaacctagttctttttaatttggttgaatgttttttcttgttaaatgatgtttaaaaaataaaaactggaagttcttggcttagtcataattcttatattcactgaagtgcctttatagaatgctaatattaatttcaaacttttggatgtgacatttggaagtgttggaatatctgagttcctcatttcatcataacatcaaatatatcaaagcctgctttaaagtattaccttggggatgattcatagctatttgtcagatttgcatacattaagatgccattggagctcttttgtctcgtttttgcattactgcacaatctagccatcttggtataggtggaggagcattgatgctaggggctggagaacttgaggcccgatataattttactacgccggcccagtttcttcaattgcaaaatagaagagttgaattaggatatatcagatttcccaaccttaaggagactttaaaaagaataatatcaaacctaggcattttcaactaacactggaatactaattttggagaccttggtttactctaccaaagacatcaaaattttttttcacttttttttcttgaaaaggaggcagggaaggtaggtcattaacatgtggctgaagtaagcttgggaaaaccaattttaaatgacaatattttttctagctaggacaactagaaagagtaaatattttaattataaaatgtatttgaaaaagaaatagaattagggaatttgtatctttcaaactatcacctcatatagagacctaggtgatagtttgagagagaaacatacaaagtccacagttctatttctttttcatatacattttacaaaaatttgttctaatgtttgaccctctaataacggaaaagaggaaaggatgttttctggtgagaactgctgttctgttcagcaaaataaagctacagaaacaaataatgagaaggtacctaaagaagcttgtttatttggaatatgagggaaccacctgtgcatctctgtgctattaaggtttctgttctcataagcaatatttaaggtcactgaaaggccaacatagttgcatgagttatttgatacccataaatacatgagaagaggccaagaggccttgctagtgatcatttcgcaaaactgtctgaggatgtccagctccatgagagcacagagagaatcactgtccagtttccaagtgggaagggtatgctttgtaatgcttttaaaagtaactgggcagtgaaatgtgaccctttaccttaataaaagacagctggaacttcaggaacatacaaaatagaaatattctttccagttgcaaaaggaacataagagggttcagattcatgaaccaagagttgagttgaccattcttatttgcagttgaattctaccatatgatttacttcacacttgcaccgaaatagtctattataaactactggtgttgggggtggggcgggagtgggaatggggaatgaaggggaggaatgaacttagtttcttaactagtataaattcagattaccatcaacttgtagaagccatatgaagtaaaaatgggtagcacctgcaacactgggacttagcgtgctattaaatgtttctaaagatagaggcacgtagctacatgtctcataggggaggatgtggttgtagctagcagttgcctactagcaggcttctttatttgcagcagcctgaaatacccaggttaggaaaagcaatcttccagaatggatgctgtggacatggtacaattggcgctattgatactttctgtaggagcttgaaatgtgtggattgtagttaagtctgaaagaaaacttgcacttgattttaaaacattttcttataaatcaattcacatttataactgagacccaacattcctgataggaatatttttgtaaatcaatggtatgaagtgtaaagacatgttgaaagttagaagaagagatcttttaagtgtatgcttgttttggctgtgaagctgaggggtttgacatttactattaaagttcaaaataaaactagcatggcatatgaagtagaattaccaaggcctgtgtttctctaagagaaccata

SEQ ID NO: 52 - protein, 189 aa, Artificial Sequence
  NRas Amino Acid Sequence
MTEYKLVVVGAGGVGKSALTIQLIQNHFVDEYDPTIEDSYRKQVVIDGETCLLDILDTAGQEEYSAMRDQYMRTGEGFLCVFAINNSKSFADINLYREQIKRVKDSDDVPMVLVGNKCDLPTRTVDTKQAHELAKSYGIPFIETSAKTRQGVEDAFYTLVREIRQYRMKKLNSSDDGTQGCMGLPCVVM

SEQ ID NO: 53 - DNA, 4326 bp, Artificial Sequence
  Synthetic
ggggccggaagtgccgctccttggtgggggctgttcatggcggttccggggtctccaacatttttcccggctgtggtcctaaatctgtccaaagcagaggcagtggagcttgaggttcttgctggtgtgaaatgactgagtacaaactggtggtggttggagcaggtggtgttgggaaaagcgcactgacaatccagctaatccagaaccactttgtagatgaatatgatcccaccatagaggattcttacagaaaacaagtggttatagatggtgaaacctgtttgttggacatactggatacagctggacaagaagagtacagtgccatgagagaccaatacatgaggacaggcgaaggcttcctctgtgtatttgccatcaataatagcaagtcatttgcggatattaacctctacagggagcagattaagcgagtaaaagactcggatgatgtacctatggtgctagtgggaaacaagtgtgatttgccaacaaggacagttgatacaaaacaagcccacgaactggccaagagttacgggattccattcattgaaacctcagccaagaccagacagggtgttgaagatgctttttacacactggtaagagaaatacgccagtaccgaatgaaaaaactcaacagcagtgatgatgggactcagggttgtatgggattgccatgtgtggtgatgtaacaagatacttttaaagttttgtcagaaaagagccactttcaagctgcactgacaccctggtcctgacttccctggaggagaagtattcctgttgctgtcttcagtctcacagagaagctcctgctacttccccagctctcagtagtttagtacaataatctctatttgagaagttctcagaataactacctcctcacttggctgtctgaccagagaatgcacctcttgttactccctgttatttttctgccctgggttcttccacagcacaaacacacctctgccaccccaggtttttcatctgaaaagcagttcatgtctgaaacagagaaccaaaccgcaaacgtgaaattctattgaaaacagtgtcttgagctctaaagtagcaactgctggtgattttttttttctttttactgttgaacttagaactatgctaatttttggagaaatgtcataaattactgttttgccaagaatatagttattattgctgtttggtttgtttataatgttatcggctctattctctaaactggcatctgctctagattcataaatacaaaaatgaatactgaattttgagtctatcctagtcttcacaactttgacgtaattaaatccaactttcacagtgaagtgcctttttcctagaagtggtttgtagacttcctttataatatttcagtggaatagatgtctcaaaaatccttatgcatgaaatgaatgtctgagatacgtctgtgacttatctaccattgaaggaaagctatatctatttgagagcagatgccattttgtacatgtatgaaattggttttccagaggcctgttttggggctttcccaggagaaagatgaaactgaaagcacatgaataatttcacttaataatttttacctaatctccacttttttcataggttactacctatacaatgtatgtaatttgtttcccctagcttactgataaacctaatattcaatgaacttccatttgtattcaaatttgtgtcataccagaaagctctacatttgcagatgttcaaatattgtaaaactttggtgcattgttatttaatagctgtgatcagtgattttcaaacctcaaatatagtatattaacaaattacattttcactgtatatcatggtatcttaatgatgtatataattgccttcaatccccttctcaccccaccctctacagcttcccccacagcaataggggcttgattatttcagttgagtaaagcatggtgctaatggaccagggtcacagtttcaaaacttgaacaatccagttagcatcacagagaaagaaattcttctgcatttgctcattgcaccagtaactccagctagtaattttgctaggtagctgcagttagccctgcaaggaaagaagaggtcagttagcacaaaccctttaccatgactggaaaactcagtatcacgtatttaaacatttttttttcttttagccatgtagaaactctaaattaagccaatattctcatttgagaatgaggatgtctcagctgagaaacgttttaaattctctttattcataatgttctttgaagggtttaaaacaagatgttgataaatctaagctgatgagtttgctcaaaacaggaagttgaaattgttgagacaggaatggaaaatataattaattgatacctatgaggatttggaggcttggcattttaatttgcagataataccctggtaattctcatgaaaaatagacttggataacttttgataaaagactaattccaaaatggccactttgttcctgtctttaatatctaaatacttactgaggtcctccatcttctatattatgaattttcatttattaagcaaatgtcatattaccttgaaattcagaagagaagaaacatatactgtgtccagagtataatgaacctgcagagttgtgcttcttactgctaattctgggagctttcacagtactgtcatcatttgtaaatggaaattctgcttttctgtttctgctccttctggagcagtgctactctgtaattttcctgaggcttatcacctcagtcatttcttttttaaatgtctgtgactggcagtgattctttttcttaaaaatctattaaatttgatgtcaaattagggagaaagatagttactcatcttgggctcttgtgccaatagcccttgtatgtatgtacttagagttttccaagtatgttctaagcacagaagtttctaaatggggccaaaattcagacttgagtatgttctttgaataccttaagaagttacaattagccgggcatggtggcccgtgcctgtagtcccagctacttgagaggctgaggcaggagaatcacttcaacccaggaggtggaggttacagtgagcagagatcgtgccactgcactccagcctgggtgacaagagagacttgtctccaaaaaaaaagttacacctaggtgtgaattttggcacaaaggagtgacaaacttatagttaaaagctgaataacttcagtgtggtataaaacgtggtttttaggctatgtttgtgattgctgaaaagaattctagtttacctcaaaatccttctctttccccaaattaagtgcctggccagctgtcataaattacatattccttttggtttttttaaaggttacatgttcaagagtgaaaataagatgttctgtctgaaggctaccatgccggatctgtaaatgaacctgttaaatgctgtatttgctccaacggcttactatagaatgttacttaatacaatatcatacttattacaatttttactataggagtgtaataggtaaaattaatctctattttagtgggcccatgtttagtctttcaccatcctttaaactgctgtgaatttttttgtcatgacttgaaagcaaggatagagaaacactttagagatatgtggggtttttttaccattccagagcttgtgagcataatcatatttgctttatatttatagtcatgaactcctaagttggcagctacaaccaagaaccaaaaaatggtgcgttctgcttcttgtaattcatctctgctaataaattataagaagcaaggaaaattagggaaaatattttatttggatggtttctataaacaagggactataattcttgtacattatttttcatctttgctgtttctttgagcagtctaatgtgccacacaattatctaaggtatttgttttctataagaattgttttaaaagtattcttgttaccagagtagttgtattatatttcaaaacgtaagatgatttttaaaagcctgagtactgacctaagatggaattgtatgaactctgctctggagggaggggaggatgtccgtggaagttgtaagacttttatttttttgtgccatcaaatataggtaaaaataattgtgcaattctgctgtttaaacaggaactattggcctccttggccctaaatggaagggccgatattttaagttgattattttattgtaaattaatccaacctagttctttttaatttggttgaatgttttttcttgttaaatgatgtttaaaaaataaaaactggaagttcttggcttagtcataa

SEQ ID NO: 54 - RNA, 22 nt, Artificial Sequence
  miR146a-5p
ugagaacugaauuccauggguu

SEQ ID NO: 55 - RNA, 22 nt, Artificial Sequence
  miR146a-3p
ccucugaaauucaguucuucag

SEQ ID NO: 56 - RNA, 23 nt, Artificial Sequence
  miR155-5p
uuaaugcuaaucgugauaggggu

SEQ ID NO: 57 - RNA, 22 nt, Artificial Sequence
  miR155-3p
cuccuacauauuagcauuaaca

SEQ ID NO: 58 - DNA, 1828 bp, Artificial Sequence
  Pmp22 mRNA
agttacagggagcaccaccagggaacatctcggggagcctggttggaagctgcaggcttagtctgtcggctgcgggtctctgactgccctgtggggagggtcttgccttaacatcccttgcatttggctgcaaagaaatctgcttggaagaaggggttacgctgtttggccgggcagaaactccgctgagcagaacttgccgccagaatgctcctcctgttgctgagtatcatcgtcctccacgtcgcggtgctggtgctgctgttcgtctccacgatcgtcagccaatggatcgtgggcaatggacacgcaactgatctctggcagaactgtagcacctcttcctcaggaaatgtccaccactgtttctcatcatcaccaaacgaatggctgcagtctgtccaggccaccatgatcctgtcgatcatcttcagcattctgtctctgttcctgttcttctgccaactcttcaccctcaccaaggggggcaggttttacatcactggaatcttccaaattcttgctggtctgtgcgtgatgagtgctgcggccatctacacggtgaggcacccggagtggcatctcaactcggattactcctacggtttcgcctacatcctggcctgggtggccttccccctggcccttctcagcggtgtcatctatgtgatcttgcggaaacgcgaatgaggcgcccagacggtctgtctgaggctctgagcgtacatagggaagggaggaagggaaaacagaaagcagacaaagaaaaaagagctagcccaaaatcccaaactcaaaccaaaccaaacagaaagcagtggaggtgggggttgctgttgattgaagatgtatataatatctccggtttataaaacctatttataacactttttacatatatgtacatagtattgtttgctttttatgttgaccatcagcctcgtgttgagccttaaagaagtagctaaggaactttacatcctaacagtataatccagctcagtatttttgttttgttttttgtttgtttgttttgttttacccagaaataagataactccatctcgccccttccctttcatctgaaagaagatacctccctcccagtccacctcatttagaaaaccaaagtgtgggtagaaaccccaaatgtccaaaagcccttttctggtgggtgacccagtgcatccaacagaaacagccgctgcccgaacctctgtgtgaagctttacgcgcacacggacaaaatgcccaaactggagcccttgcaaaaacacggcttgtggcattggcatacttgcccttacaggtggagtatcttcgtcacacatctaaatgagaaatcagtgacaacaagtctttgaaatggtgctatggatttaccattccttattatcactaatcatctaaacaactcactggaaatccaattaacaattttacaacataagatagaatggagacctgaataattctgtgtaatataaatggtttataactgcttttgtacctagctaggctgctattattactataatgagtaaatcataaagccttcatcactcccacatttttcttacggtcggagcatcagaacaagcgtctagactccttgggaccgtgagttcctagagcttggctgggtctaggctgttctgtgcctccaaggactgtctggcaatgacttgtattggccaccaactgtagatgtatatatggtgcccttctgatgctaagactccagaccttttgtttttgctttgcattttctgattttataccaactgtgtggactaagatgcattaaaataaacatcagagtaactca

SEQ ID NO: 59 - DNA, 483 bp, Artificial Sequence
  Pmp22 Coding sequence
atgctcctcctgttgctgagtatcatcgtcctccacgtcgcggtgctggtgctgctgttcgtctccacgatcgtcagccaatggatcgtgggcaatggacacgcaactgatctctggcagaactgtagcacctcttcctcaggaaatgtccaccactgtttctcatcatcaccaaacgaatggctgcagtctgtccaggccaccatgatcctgtcgatcatcttcagcattctgtctctgttcctgttcttctgccaactcttcaccctcaccaaggggggcaggttttacatcactggaatcttccaaattcttgctggtctgtgcgtgatgagtgctgcggccatctacacggtgaggcacccggagtggcatctcaactcggattactcctacggtttcgcctacatcctggcctgggtggccttccccctggcccttctcagcggtgtcatctatgtgatcttgcggaaacgcgaatga

SEQ ID NO: 60 - protein, 160 aa, Artificial Sequence
  Pmp protein sequence
MLLLLLSIIVLHVAVLVLLFVSTIVSQWIVGNGHATDLWQNCSTSSSGNVHHCFSSSPNEWLQSVQATMILSIIFSILSLFLFFCQLFTLTKGGRFYITGIFQILAGLCVMSAAAIYTVRHPEWHLNSDYSYGFAYILAWVAFPLALLSGVIYVILRKRE

SEQ ID NO: 61 - DNA, 16 bp, Artificial Sequence
  Nucleic Acid Sequence
atcttcaatcaacagc

SEQ ID NO: 62 - DNA, 17 bp, Artificial Sequence
  Antisense Oligonucleotide
caaacagcgtaacccct

SEQ ID NO: 63 - DNA, 20 bp, Artificial Sequence
  Antisense Oligonucleotide
cgtggaggacgatgatactc

SEQ ID NO: 64 - DNA, 20 bp, Artificial Sequence
  Antisense Oligonucleotide
gacgtggaggacgatgatac

SEQ ID NO: 65 - DNA, 20 bp, Artificial Sequence
  Antisense Oligonucleotide
agcaccgcgacgtggaggac

SEQ ID NO: 66 - DNA, 20 bp, Artificial Sequence
  Antisense Oligonucleotide
ctgacgatcgtggagacgaa

SEQ ID NO: 67 - DNA, 20 bp, Artificial Sequence
  Antisense Oligonucleotide
cattggctgacgatcgtgga

SEQ ID NO: 68 - DNA, 20 bp, Artificial Sequence
  Antisense Oligonucleotide
agactgcagccattcgtttg

SEQ ID NO: 69 - DNA, 20 bp, Artificial Sequence
  Antisense Oligonucleotide
gacagactgcagccattcgt

SEQ ID NO: 70 - DNA, 20 bp, Artificial Sequence
  Antisense Oligonucleotide
tggacagactgcagccattc

SEQ ID NO: 71 - DNA, 20 bp, Artificial Sequence
  Antisense Oligonucleotide
atgctgaagatgatcgacag

SEQ ID NO: 72 - DNA, 20 bp, Artificial Sequence
  Antisense Oligonucleotide
gtaaaacctgccccccttgg

SEQ ID NO: 73 - DNA, 20 bp, Artificial Sequence
  Antisense Oligonucleotide
taggagtaatccgagttgag

SEQ ID NO: 74 - DNA, 20 bp, Artificial Sequence
  Antisense Oligonucleotide
tcattcgcgtttccgcaaga

SEQ ID NO: 75 - DNA, 20 bp, Artificial Sequence
  Antisense Oligonucleotide
ctcattcgcgtttccgcaag

SEQ ID NO: 76 - DNA, 20 bp, Artificial Sequence
  Antisense Oligonucleotide
cctcattcgcgtttccgcaa

SEQ ID NO: 77 - DNA, 20 bp, Artificial Sequence
  Antisense Oligonucleotide
gcctcattcgcgtttccgca

SEQ ID NO: 78 - DNA, 17 bp, Artificial Sequence
  Antisense Oligonucleotide
ctcattcgcgtttccgc

SEQ ID NO: 79 - DNA, 16 bp, Artificial Sequence
  Antisense Oligonucleotide
ctcattcgcgtttccg

SEQ ID NO: 80 - DNA, 16 bp, Artificial Sequence
  Antisense Oligonucleotide
gcctcattcgcgtttc

SEQ ID NO: 81 - DNA, 20 bp, Artificial Sequence
  Antisense Oligonucleotide
ctttaaggctcaacacgagg

SEQ ID NO: 82 - DNA, 20 bp, Artificial Sequence
  Antisense Oligonucleotide
tctttaaggctcaacacgag

SEQ ID NO: 83 - DNA, 20 bp, Artificial Sequence
  Antisense Oligonucleotide
gggtttctacccacactttg

SEQ ID NO: 84 - DNA, 20 bp, Artificial Sequence
  Antisense Oligonucleotide
ttggggtttctacccacact

SEQ ID NO: 85 - DNA, 20 bp, Artificial Sequence
  Antisense Oligonucleotide
cacctgtaagggcaagtatg

SEQ ID NO: 86 - DNA, 20 bp, Artificial Sequence
  Antisense Oligonucleotide
ttagatgtgtgacgaagata

SEQ ID NO: 87 - DNA, 20 bp, Artificial Sequence
  Antisense Oligonucleotide
tttagatgtgtgacgaagat

SEQ ID NO: 88 - DNA, 20 bp, Artificial Sequence
  Antisense Oligonucleotide
catttagatgtgtgacgaag

SEQ ID NO: 89 - DNA, 20 bp, Artificial Sequence
  Antisense Oligonucleotide
ggtaaatccatagcaccatt

SEQ ID NO: 90 - DNA, 20 bp, Artificial Sequence
  Antisense Oligonucleotide
tccagtgagttgtttagatg

SEQ ID NO: 91 - DNA, 20 bp, Artificial Sequence
  Antisense Oligonucleotide
cacggtcccaaggagtctag

SEQ ID NO: 92 - DNA, 20 bp, Artificial Sequence
  Antisense Oligonucleotide
tcacggtcccaaggagtcta

SEQ ID NO: 93 - DNA, 20 bp, Artificial Sequence
  Antisense Oligonucleotide
aggaactcacggtcccaagg

SEQ ID NO: 94 - DNA, 20 bp, Artificial Sequence
  Antisense Oligonucleotide
taggaactcacggtcccaag

SEQ ID NO: 95 - DNA, 20 bp, Artificial Sequence
  Antisense Oligonucleotide
gtggccaatacaagtcattg

SEQ ID NO: 96-100 - skipped (5 entries)

SEQ ID NO: 101 - DNA, 20 bp, Artificial Sequence
  Antisense Oligonucleotide
ggctcgatccaggagtgtgt

SEQ ID NO: 102 - DNA, 20 bp, Artificial Sequence
  Antisense Oligonucleotide
ttggctcgatccaggagtgt

SEQ ID NO: 103 - DNA, 20 bp, Artificial Sequence
  Antisense Oligonucleotide
ctcctgttggctcgatccag

SEQ ID NO: 104 - DNA, 20 bp, Artificial Sequence
  Antisense Oligonucleotide
gcgggtgcttgccatcttca

SEQ ID NO: 105 - DNA, 20 bp, Artificial Sequence
  Antisense Oligonucleotide
ggatagtcctctaagtgcat

SEQ ID NO: 106 - DNA, 20 bp, Artificial Sequence
  Antisense Oligonucleotide
ggctagatccacatggtctg

SEQ ID NO: 107 - DNA, 20 bp, Artificial Sequence
  Antisense Oligonucleotide
tagcgtggctagatccacat

SEQ ID NO: 108 - DNA, 20 bp, Artificial Sequence
  Antisense Oligonucleotide
ttagcgtggctagatccaca

SEQ ID NO: 109 - DNA, 20 bp, Artificial Sequence
  Antisense Oligonucleotide
attagcgtggctagatccac

SEQ ID NO: 110 - DNA, 20 bp, Artificial Sequence
  Antisense Oligonucleotide
tcattagcgtggctagatcc

SEQ ID NO: 111 - DNA, 20 bp, Artificial Sequence
  Antisense Oligonucleotide
atcattagcgtggctagatc

SEQ ID NO: 112 - DNA, 20 bp, Artificial Sequence
  Antisense Oligonucleotide
gcgaagatccacacggccat

SEQ ID NO: 113 - DNA, 20 bp, Artificial Sequence
  Antisense Oligonucleotide
atcgcagcgaagatccacac

SEQ ID NO: 114 - DNA, 20 bp, Artificial Sequence
  Antisense Oligonucleotide
gttgatcgcagcgaagatcc

SEQ ID NO: 115 - DNA, 20 bp, Artificial Sequence
  Antisense Oligonucleotide
ctgttgatcgcagcgaagat

SEQ ID NO: 116 - DNA, 20 bp, Artificial Sequence
  Antisense Oligonucleotide
ctcctgttgatcgcagcgaa

SEQ ID NO: 117 - DNA, 20 bp, Artificial Sequence
  Antisense Oligonucleotide
tctcctgttgatcgcagcga

SEQ ID NO: 118 - DNA, 20 bp, Artificial Sequence
  Antisense Oligonucleotide
ctctcctgttgatcgcagcg

SEQ ID NO: 119 - DNA, 20 bp, Artificial Sequence
  Antisense Oligonucleotide
ctgaaccccacttcggctca

SEQ ID NO: 120 - DNA, 20 bp, Artificial Sequence
  Antisense Oligonucleotide
attatctgaaccccacttcg

SEQ ID NO: 121 - DNA, 20 bp, Artificial Sequence
  Antisense Oligonucleotide
cacgtgcattatctgaaccc

SEQ ID NO: 122 - DNA, 20 bp, Artificial Sequence
  Antisense Oligonucleotide
tcgaaaggtactccagtaaa

SEQ ID NO: 123 - DNA, 20 bp, Artificial Sequence
  Antisense Oligonucleotide
gattctcgaaaggtactcca

SEQ ID NO: 124 - DNA, 20 bp, Artificial Sequence
  Antisense Oligonucleotide
atagagattctcgaaaggta

SEQ ID NO: 125 - DNA, 20 bp, Artificial Sequence
  Antisense Oligonucleotide
cacgtactttctgtacttct

SEQ ID NO: 126 - DNA, 20 bp, Artificial Sequence
  Antisense Oligonucleotide
tggaatctgcttctcacgta

SEQ ID NO: 127 - DNA, 20 bp, Artificial Sequence
  Antisense Oligonucleotide
cgggcattcctgtcttcaat

SEQ ID NO: 128 - DNA, 20 bp, Artificial Sequence
  Antisense Oligonucleotide
acccagacgggcattcctgt

SEQ ID NO: 129 - DNA, 20 bp, Artificial Sequence
  Antisense Oligonucleotide
cgtttgttgaggctcacact

SEQ ID NO: 130 - DNA, 20 bp, Artificial Sequence
  Antisense Oligonucleotide
tgtagcgtttgttgaggctc

SEQ ID NO: 131 - DNA, 20 bp, Artificial Sequence
  Antisense Oligonucleotide
agtcgtgtgtagcgtttgtt

SEQ ID NO: 132 - DNA, 20 bp, Artificial Sequence
  Antisense Oligonucleotide
cagtcgtgtgtagcgtttgt

SEQ ID NO: 133 - DNA, 20 bp, Artificial Sequence
  Antisense Oligonucleotide
gcagtcgtgtgtagcgtttg

SEQ ID NO: 134 - DNA, 20 bp, Artificial Sequence
  Antisense Oligonucleotide
cgcagtcgtgtgtagcgttt

SEQ ID NO: 135 - DNA, 20 bp, Artificial Sequence
  Antisense Oligonucleotide
acgtcttggtcttgccgatg

SEQ ID NO: 136 - DNA, 20 bp, Artificial Sequence
  Antisense Oligonucleotide
cacgtcttggtcttgccgat

SEQ ID NO: 137 - DNA, 20 bp, Artificial Sequence
  Antisense Oligonucleotide
atcttaatgggactcacggg

SEQ ID NO: 138 - DNA, 20 bp, Artificial Sequence
  Antisense Oligonucleotide
ccatcttaatgggactcacg

SEQ ID NO: 139 - DNA, 20 bp, Artificial Sequence
  Antisense Oligonucleotide
actccatcttaatgggactc

SEQ ID NO: 140 - DNA, 20 bp, Artificial Sequence
  Antisense Oligonucleotide
tagtcaaacctgtcttggta

SEQ ID NO: 141 - DNA, 20 bp, Artificial Sequence
  Antisense Oligonucleotide
gctcatgatcaggtccccca

SEQ ID NO: 142 - DNA, 20 bp, Artificial Sequence
  Antisense Oligonucleotide
ggcagcagctcatgatcagg

SEQ ID NO: 143 - DNA, 20 bp, Artificial Sequence
  Antisense Oligonucleotide
cgtcaaaggcaccttgcagc

SEQ ID NO: 144 - DNA, 20 bp, Artificial Sequence
  Antisense Oligonucleotide
tgtgctcgtcaaaggcacct

SEQ ID NO: 145 - DNA, 20 bp, Artificial Sequence
  Antisense Oligonucleotide
gtcctatgtgctcgtcaaag

SEQ ID NO: 146 - DNA, 20 bp, Artificial Sequence
  Antisense Oligonucleotide
cggtcctatgtgctcgtcaa

SEQ ID NO: 147 - DNA, 20 bp, Artificial Sequence
  Antisense Oligonucleotide
agcggtcctatgtgctcgtc

SEQ ID NO: 148 - DNA, 20 bp, Artificial Sequence
  Antisense Oligonucleotide
gagcggtcctatgtgctcgt

SEQ ID NO: 149 - DNA, 20 bp, Artificial Sequence
  Antisense Oligonucleotide
agagcggtcctatgtgctcg

SEQ ID NO: 150 - DNA, 20 bp, Artificial Sequence
  Antisense Oligonucleotide
cagtgcagagcggtcctatg

SEQ ID NO: 151 - DNA, 20 bp, Artificial Sequence
  Antisense Oligonucleotide
ccagtcagtgcagagcggtc

SEQ ID NO: 152 - DNA, 20 bp, Artificial Sequence
  Antisense Oligonucleotide
tcggccttctgccagtcagt

SEQ ID NO: 153 - DNA, 20 bp, Artificial Sequence
  Antisense Oligonucleotide
gaatgtctccccgctcggcc

SEQ ID NO: 154 - DNA, 20 bp, Artificial Sequence
  Antisense Oligonucleotide
gagaatgtctccccgctcgg

SEQ ID NO: 155 - DNA, 20 bp, Artificial Sequence
  Antisense Oligonucleotide
caggagaatgtctccccgct

SEQ ID NO: 156 - DNA, 20 bp, Artificial Sequence
  Antisense Oligonucleotide
gatctccacatgccgaggat

SEQ ID NO: 157 - DNA, 20 bp, Artificial Sequence
  Antisense Oligonucleotide
ttctcctgaatcagactgaa

SEQ ID NO: 158 - DNA, 20 bp, Artificial Sequence
  Antisense Oligonucleotide
cagtccagtgcacacgatcc

SEQ ID NO: 159 - DNA, 20 bp, Artificial Sequence
  Antisense Oligonucleotide
tacatggcggcaaagaactc

SEQ ID NO: 160 - DNA, 20 bp, Artificial Sequence
  Antisense Oligonucleotide
cgaatttgccatagttttcc

SEQ ID NO: 161 - DNA, 20 bp, Artificial Sequence
  Antisense Oligonucleotide
ccaaagaggaaacgtacaac

SEQ ID NO: 162 - DNA, 20 bp, Artificial Sequence
  Antisense Oligonucleotide
gcctgatttgctgagagatc

SEQ ID NO: 163 - DNA, 20 bp, Artificial Sequence
  Antisense Oligonucleotide
catctcgtacaaacagtaga

SEQ ID NO: 164 - DNA, 20 bp, Artificial Sequence
  Antisense Oligonucleotide
gcatctcgtacaaacagtag

SEQ ID NO: 165 - DNA, 20 bp, Artificial Sequence
  Antisense Oligonucleotide
atggccctttgcacgaagtc

SEQ ID NO: 166 - DNA, 20 bp, Artificial Sequence
  Antisense Oligonucleotide
agtccatggccctttgcacg

SEQ ID NO: 167 - DNA, 20 bp, Artificial Sequence
  Antisense Oligonucleotide
agagattgatctcaatcttg

SEQ ID NO: 168 - DNA, 20 bp, Artificial Sequence
  Antisense Oligonucleotide
gatgacagttctcaatgcaa

SEQ ID NO: 169 - DNA, 20 bp, Artificial Sequence
  Antisense Oligonucleotide
cacccgatgacagttctcaa

SEQ ID NO: 170 - DNA, 20 bp, Artificial Sequence
  Antisense Oligonucleotide
gactccacccgatgacagtt

SEQ ID NO: 171 - DNA, 20 bp, Artificial Sequence
  Antisense Oligonucleotide
aaggtgtcggccttcctttt

SEQ ID NO: 172 - DNA, 20 bp, Artificial Sequence
  Antisense Oligonucleotide
catatcaaggtgtcggcctt

SEQ ID NO: 173 - DNA, 20 bp, Artificial Sequence
  Antisense Oligonucleotide
cagcactcatgcgagaggcc

SEQ ID NO: 174 - DNA, 20 bp, Artificial Sequence
  Antisense Oligonucleotide
gtcgaagcagcactcatgcg

SEQ ID NO: 175 - DNA, 20 bp, Artificial Sequence
  Antisense Oligonucleotide
gaggaccaaggagatgtcga

SEQ ID NO: 176 - DNA, 20 bp, Artificial Sequence
  Antisense Oligonucleotide
tggttgctgctgaggaccaa

SEQ ID NO: 177 - DNA, 20 bp, Artificial Sequence
  Antisense Oligonucleotide
gattgcacaacaggtgcttc

SEQ ID NO: 178 - DNA, 20 bp, Artificial Sequence
  Antisense Oligonucleotide
ggtgcgtgagattctgatta

SEQ ID NO: 179 - DNA, 20 bp, Artificial Sequence
  Antisense Oligonucleotide
gtaaaggtgcgtgagattct

SEQ ID NO: 180 - DNA, 20 bp, Artificial Sequence
  Antisense Oligonucleotide
ctcgcaggtaaaggtgcgtg

SEQ ID NO: 181 - DNA, 20 bp, Artificial Sequence
  Antisense Oligonucleotide
cctcgcaggtaaaggtgcgt

SEQ ID NO: 182 - DNA, 20 bp, Artificial Sequence
  Antisense Oligonucleotide
gttgcctcgcaggtaaaggt

SEQ ID NO: 183 - DNA, 20 bp, Artificial Sequence
  Antisense Oligonucleotide
agagtgttgcctcgcaggta

SEQ ID NO: 184 - DNA, 20 bp, Artificial Sequence
  Antisense Oligonucleotide
cgagagtgttgcctcgcagg

SEQ ID NO: 185 - DNA, 20 bp, Artificial Sequence
  Antisense Oligonucleotide
tccgagagtgttgcctcgca

SEQ ID NO: 186 - DNA, 20 bp, Artificial Sequence
  Antisense Oligonucleotide
ctccgagagtgttgcctcgc

SEQ ID NO: 187 - DNA, 20 bp, Artificial Sequence
  Antisense Oligonucleotide
tctccgagagtgttgcctcg

SEQ ID NO: 188 - DNA, 20 bp, Artificial Sequence
  Antisense Oligonucleotide
cttgtctccgagagtgttgc

SEQ ID NO: 189 - DNA, 20 bp, Artificial Sequence
  Antisense Oligonucleotide
gatccccttgtctccgagag

SEQ ID NO: 190 - DNA, 20 bp, Artificial Sequence
  Antisense Oligonucleotide
acctgaagcttgcagtcggg

SEQ ID NO: 191 - DNA, 20 bp, Artificial Sequence
  Antisense Oligonucleotide
gcagttgtctaattccaaca

SEQ ID NO: 192 - DNA, 20 bp, Artificial Sequence
  Antisense Oligonucleotide
aggttgcagttgtctaattc

SEQ ID NO: 193 - DNA, 20 bp, Artificial Sequence
  Antisense Oligonucleotide
gtgacgtgaggttgcagttg

SEQ ID NO: 194 - DNA, 20 bp, Artificial Sequence
  Antisense Oligonucleotide
gcagtgtgacgtgaggttgc

SEQ ID NO: 195 - DNA, 20 bp, Artificial Sequence
  Antisense Oligonucleotide
gctcagctttcgcaggctct

SEQ ID NO: 196 - DNA, 20 bp, Artificial Sequence
  Antisense Oligonucleotide
gtcgcccaggtcattgttgc

SEQ ID NO: 197 - DNA, 20 bp, Artificial Sequence
  Antisense Oligonucleotide
atcatgacccccaggtcgcc

SEQ ID NO: 198 - DNA, 20 bp, Artificial Sequence
  Antisense Oligonucleotide
acatcctctaactgaggcgc

SEQ ID NO: 199 - DNA, 20 bp, Artificial Sequence
  Antisense Oligonucleotide
ccaagaggaacatcctctaa

SEQ ID NO: 200 - DNA, 20 bp, Artificial Sequence
  Antisense Oligonucleotide
gttatggtcagttaatagaa

SEQ ID NO: 201 - DNA, 20 bp, Artificial Sequence
  Antisense Oligonucleotide
caccagggaacatctcgggg

SEQ ID NO: 202 - DNA, 20 bp, Artificial Sequence
  Antisense Oligonucleotide
accagggaacatctcgggga

SEQ ID NO: 203 - DNA, 20 bp, Artificial Sequence
  Antisense Oligonucleotide
ccagggaacatctcggggag

SEQ ID NO: 204 - DNA, 20 bp, Artificial Sequence
  Antisense Oligonucleotide
gggaacatctcggggagcct

SEQ ID NO: 205 - DNA, 20 bp, Artificial Sequence
  Antisense Oligonucleotide
ggaacatctcggggagcctg

SEQ ID NO: 206 - DNA, 20 bp, Artificial Sequence
  Antisense Oligonucleotide
gagcctggttggaagctgca

SEQ ID NO: 207 - DNA, 17 bp, Artificial Sequence
  Antisense Oligonucleotide
gcaggcttagtctgtcg

SEQ ID NO: 208 - DNA, 15 bp, Artificial Sequence
  Antisense Oligonucleotide
aggcttagtctgtcg

SEQ ID NO: 209 - DNA, 17 bp, Artificial Sequence
  Antisense Oligonucleotide
ttagtctgtcggctgcg

SEQ ID NO: 210 - DNA, 20 bp, Artificial Sequence
  Antisense Oligonucleotide
gcttggaagaaggggttacg

SEQ ID NO: 211 - DNA, 20 bp, Artificial Sequence
  Antisense Oligonucleotide
gaagaaggggttacgctgtt

SEQ ID NO: 212 - DNA, 20 bp, Artificial Sequence
  Antisense Oligonucleotide
aagaaggggttacgctgttt

SEQ ID NO: 213 - DNA, 20 bp, Artificial Sequence
  Antisense Oligonucleotide
agaaggggttacgctgtttg

SEQ ID NO: 214 - DNA, 20 bp, Artificial Sequence
  Antisense Oligonucleotide
gaaggggttacgctgtttgg

SEQ ID NO: 215 - DNA, 20 bp, Artificial Sequence
  Antisense Oligonucleotide
aaggggttacgctgtttggc

SEQ ID NO: 216 - DNA, 15 bp, Artificial Sequence
  Antisense Oligonucleotide
aggggttacgctgtt

SEQ ID NO: 217 - DNA, 15 bp, Artificial Sequence
  Antisense Oligonucleotide
ggttacgctgtttgg

SEQ ID NO: 218 - DNA, 17 bp, Artificial Sequence
  Antisense Oligonucleotide
gttacgctgtttggccg

SEQ ID NO: 219 - DNA, 15 bp, Artificial Sequence
  Antisense Oligonucleotide
gttacgctgtttggc

SEQ ID NO: 220 - DNA, 17 bp, Artificial Sequence
  Antisense Oligonucleotide
ttacgctgtttggccgg

SEQ ID NO: 221 - DNA, 20 bp, Artificial Sequence
  Antisense Oligonucleotide
tacgctgtttggccgggcag

SEQ ID NO: 222 - DNA, 20 bp, Artificial Sequence
  Antisense Oligonucleotide
acgctgtttggccgggcaga

SEQ ID NO: 223 - DNA, 20 bp, Artificial Sequence
  Antisense Oligonucleotide
cgctgtttggccgggcagaa

SEQ ID NO: 224 - DNA, 20 bp, Artificial Sequence
  Antisense Oligonucleotide
gctgtttggccgggcagaaa

SEQ ID NO: 225 - DNA, 20 bp, Artificial Sequence
  Antisense Oligonucleotide
ctgtttggccgggcagaaac

SEQ ID NO: 226 - DNA, 20 bp, Artificial Sequence
  Antisense Oligonucleotide
tgtttggccgggcagaaact

SEQ ID NO: 227 - DNA, 20 bp, Artificial Sequence
  Antisense Oligonucleotide
gtttggccgggcagaaactc

SEQ ID NO: 228 - DNA, 20 bp, Artificial Sequence
  Antisense Oligonucleotide
ttggccgggcagaaactccg

SEQ ID NO: 229 - DNA, 20 bp, Artificial Sequence
  Antisense Oligonucleotide
tggccgggcagaaactccgc

SEQ ID NO: 230 - DNA, 20 bp, Artificial Sequence
  Antisense Oligonucleotide
ggccgggcagaaactccgct

SEQ ID NO: 231 - DNA, 20 bp, Artificial Sequence
  Antisense Oligonucleotide
gccgggcagaaactccgctg

SEQ ID NO: 232 - DNA, 20 bp, Artificial Sequence
  Antisense Oligonucleotide
ccgggcagaaactccgctga

SEQ ID NO: 233 - DNA, 20 bp, Artificial Sequence
  Antisense Oligonucleotide
cgggcagaaactccgctgag

SEQ ID NO: 234 - DNA, 20 bp, Artificial Sequence
  Antisense Oligonucleotide
gggcagaaactccgctgagc

SEQ ID NO: 235 - DNA, 20 bp, Artificial Sequence
  Antisense Oligonucleotide
ggcagaaactccgctgagca

SEQ ID NO: 236 - DNA, 20 bp, Artificial Sequence
  Antisense Oligonucleotide
ccccgagatgttccctggtg

SEQ ID NO: 237 - DNA, 20 bp, Artificial Sequence
  Antisense Oligonucleotide
tccccgagatgttccctggt

SEQ ID NO: 238 - DNA, 20 bp, Artificial Sequence
  Antisense Oligonucleotide
ctccccgagatgttccctgg

SEQ ID NO: 239 - DNA, 20 bp, Artificial Sequence
  Antisense Oligonucleotide
aggctccccgagatgttccc

SEQ ID NO: 240 - DNA, 20 bp, Artificial Sequence
  Antisense Oligonucleotide
caggctccccgagatgttcc

SEQ ID NO: 241 - DNA, 20 bp, Artificial Sequence
  Antisense Oligonucleotide
tgcagcttccaaccaggctc

SEQ ID NO: 242 - DNA, 17 bp, Artificial Sequence
  Antisense Oligonucleotide
cgacagactaagcctgc

SEQ ID NO: 243 - DNA, 15 bp, Artificial Sequence
  Antisense Oligonucleotide
cgacagactaagcct

SEQ ID NO: 244 - DNA, 17 bp, Artificial Sequence
  Antisense Oligonucleotide
cgcagccgacagactaa

SEQ ID NO: 245 - DNA, 20 bp, Artificial Sequence
  Antisense Oligonucleotide
cgtaaccccttcttccaagc

SEQ ID NO: 246 - DNA, 20 bp, Artificial Sequence
  Antisense Oligonucleotide
aacagcgtaaccccttcttc

SEQ ID NO: 247 - DNA, 20 bp, Artificial Sequence
  Antisense Oligonucleotide
aaacagcgtaaccccttctt

SEQ ID NO: 248 - DNA, 20 bp, Artificial Sequence
  Antisense Oligonucleotide
caaacagcgtaaccccttct

SEQ ID NO: 249 - DNA, 20 bp, Artificial Sequence
  Antisense Oligonucleotide
ccaaacagcgtaaccccttc

SEQ ID NO: 250 - DNA, 20 bp, Artificial Sequence
  Antisense Oligonucleotide
gccaaacagcgtaacccctt

SEQ ID NO: 251 - DNA, 15 bp, Artificial Sequence
  Antisense Oligonucleotide
aacagcgtaacccct

SEQ ID NO: 252 - DNA, 15 bp, Artificial Sequence
  Antisense Oligonucleotide
ccaaacagcgtaacc

SEQ ID NO: 253 - DNA, 17 bp, Artificial Sequence
  Antisense Oligonucleotide
cggccaaacagcgtaac

SEQ ID NO: 254 - DNA, 15 bp, Artificial Sequence
  Antisense Oligonucleotide
gccaaacagcgtaac

SEQ ID NO: 255 - DNA, 17 bp, Artificial Sequence
  Antisense Oligonucleotide
ccggccaaacagcgtaa

SEQ ID NO: 256 - DNA, 20 bp, Artificial Sequence
  Antisense Oligonucleotide
ctgcccggccaaacagcgta

SEQ ID NO: 257 - DNA, 20 bp, Artificial Sequence
  Antisense Oligonucleotide
tctgcccggccaaacagcgt

SEQ ID NO: 258 - DNA, 20 bp, Artificial Sequence
  Antisense Oligonucleotide
ttctgcccggccaaacagcg

SEQ ID NO: 259 - DNA, 20 bp, Artificial Sequence
  Antisense Oligonucleotide
tttctgcccggccaaacagc

SEQ ID NO: 260 - DNA, 20 bp, Artificial Sequence
  Antisense Oligonucleotide
gtttctgcccggccaaacag

SEQ ID NO: 261 - DNA, 20 bp, Artificial Sequence
  Antisense Oligonucleotide
agtttctgcccggccaaaca

SEQ ID NO: 262 - DNA, 20 bp, Artificial Sequence
  Antisense Oligonucleotide
gagtttctgcccggccaaac

SEQ ID NO: 263 - DNA, 20 bp, Artificial Sequence
  Antisense Oligonucleotide
cggagtttctgcccggccaa

SEQ ID NO: 264 - DNA, 20 bp, Artificial Sequence
  Antisense Oligonucleotide
gcggagtttctgcccggcca

SEQ ID NO: 265 - DNA, 20 bp, Artificial Sequence
  Antisense Oligonucleotide
agcggagtttctgcccggcc

SEQ ID NO: 266 - DNA, 20 bp, Artificial Sequence
  Antisense Oligonucleotide
cagcggagtttctgcccggc

SEQ ID NO: 267 - DNA, 20 bp, Artificial Sequence
  Antisense Oligonucleotide
tcagcggagtttctgcccgg

SEQ ID NO: 268 - DNA, 20 bp, Artificial Sequence
  Antisense Oligonucleotide
ctcagcggagtttctgcccg

SEQ ID NO: 269 - DNA, 20 bp, Artificial Sequence
  Antisense Oligonucleotide
gctcagcggagtttctgccc

SEQ ID NO: 270 - DNA, 20 bp, Artificial Sequence
  Antisense Oligonucleotide
tgctcagcggagtttctgcc

SEQ ID NO: 271-300 - skipped (30 entries)

SEQ ID NO: 301 - protein, 879 aa, Artificial Sequence
  PrX - PTGFRN
MGRLASRPLLLALLSLALCRGRVVRVPTATLVRVVGTELVIPCNVSDYDGPSEQNFDWSFSSLGSSFVELASTWEVGFPAQLYQERLQRGEILLRRTANDAVELHIKNVQPSDQGHYKCSTPSTDATVQGNYEDTVQVKVLADSLHVGPSARPPPSLSLREGEPFELRCTAASASPLHTHLALLWEVHRGPARRSVLALTHEGRFHPGLGYEQRYHSGDVRLDTVGSDAYRLSVSRALSADQGSYRCIVSEWIAEQGNWQEIQEKAVEVATVVIQPSVLRAAVPKNVSVAEGKELDLTCNITTDRADDVRPEVTWSFSRMPDSTLPGSRVLARLDRDSLVHSSPHVALSHVDARSYHLLVRDVSKENSGYYYCHVSLWAPGHNRSWHKVAEAVSSPAGVGVTWLEPDYQVYLNASKVPGFADDPTELACRVVDTKSGEANVRFTVSWYYRMNRRSDNVVTSELLAVMDGDWTLKYGERSKQRAQDGDFIFSKEHTDTFNFRIQRTTEEDRGNYYCVVSAWTKQRNNSWVKSKDVFSKPVNIFWALEDSVLVVKARQPKPFFAAGNTFEMTCKVSSKNIKSPRYSVLIMAEKPVGDLSSPNETKYIISLDQDSVVKLENWTDASRVDGVVLEKVQEDEFRYRMYQTQVSDAGLYRCMVTAWSPVRGSLWREAATSLSNPIEIDFQTSGPIFNASVHSDTPSVIRGDLIKLFCIITVEGAALDPDDMAFDVSWFAVHSFGLDKAPVLLSSLDRKGIVTTSRRDWKSDLSLERVSVLEFLLQVHGSEDQDFGNYYCSVTPWVKSPTGSWQKEAEIHSKPVFITVKMDVLNAFKYPLLIGVGLSTVIGLLSCLIGYCSSHWCCKKEVQETRRERRRLMSMEMD

SEQ ID NO: 302 - protein, 192 aa, Artificial Sequence
  PrX - PTGFRN fragment
GPIFNASVHSDTPSVIRGDLIKLFCIITVEGAALDPDDMAFDVSWFAVHSFGLDKAPVLLSSLDRKGIVTTSRRDWKSDLSLERVSVLEFLLQVHGSEDQDFGNYYCSVTPWVKSPTGSWQKEAEIHSKPVFITVKMDVLNAFKYPLLIGVGLSTVIGLLSCLIGYCSSHWCCKKEVQETRRERRRLMSMEM

SEQ ID NO: 303 - protein, 385 aa, Artificial Sequence
  BSG Protein
MAAALFVLLGFALLGTHGASGAAGFVQAPLSQQRWVGGSVELHCEAVGSPVPEIQWWFEGQGPNDTCSQLWDGARLDRVHIHATYHQHAASTISIDTLVEEDTGTYECRASNDPDRNHLTRAPRVKWVRAQAVVLVLEPGTVFTTVEDLGSKILLTCSLNDSATEVTGHRWLKGGVVLKEDALPGQKTEFKVDSDDQWGEYSCVFLPEPMGTANIQLHGPPRVKAVKSSEHINEGETAMLVCKSESVPPVTDWAWYKITDSEDKALMNGSESRFFVSSSQGRSELHIENLNMEADPGQYRCNGTSSKGSDQAIITLRVRSHLAALWPFLGIVAEVLVLVTIIFIYEKRRKPEDVLDDDDAGSAPLKSSGQHQNDKGKNVRQRNSS

SEQ ID NO: 304 - protein, 613 aa, Artificial Sequence
  The IGSF8 protein
MGALRPTLLPPSLPLLLLLMLGMGCWAREVLVPEGPLYRVAGTAVSISCNVTGYEGPAQQNFEWFLYRPEAPDTALGIVSTKDTQFSYAVFKSRVVAGEVQVQRLQGDAVVLKIARLQAQDAGIYECHTPSTDTRYLGSYSGKVELRVLPDVLQVSAAPPGPRGRQAPTSPPRMTVHEGQELALGCLARTSTQKHTHLAVSFGRSVPEAPVGRSTLQEVVGIRSDLAVEAGAPYAERLAAGELRLGKEGTDRYRMVVGGAQAGDAGTYHCTAAEWIQDPDGSWAQIAEKRAVLAHVDVQTLSSQLAVTVGPGERRIGPGEPLELLCNVSGALPPAGRHAAYSVGWEMAPAGAPGPGRLVAQLDTEGVGSLGPGYEGRHIAMEKVASRTYRLRLEAARPGDAGTYRCLAKAYVRGSGTRLREAASARSRPLPVHVREEGVVLEAVAWLAGGTVYRGETASLLCNISVRGGPPGLRLAASWWVERPEDGELSSVPAQLVGGVGQDGVAELGVRPGGGPVSVELVGPRSHRLRLHSLGPEDEGVYHCAPSAWVQHADYSWYQAGSARSGPVTVYPYMHALDTLFVPLLVGTGVALVTGATVLGTITCCFMKRLRKR

SEQ ID NO: 305 - protein, 748 aa, Artificial Sequence
  The ITGB1 protein
MNLQPIFWIGLISSVCCVFAQTDENRCLKANAKSCGECIQAGPNCGWCTNSTFLQEGMPTSARCDDLEALKKKGCPPDDIENPRGSKDIKKNKNVTNRSKGTAEKLKPEDITQIQPQQLVLRLRSGEPQTFTLKFKRAEDYPIDLYYLMDLSYSMKDDLENVKSLGTDLMNEMRRITSDFRIGFGSFVEKTVMPYISTTPAKLRNPCTSEQNCTSPFSYKNVLSLTNKGEVFNELVGKQRISGNLDSPEGGFDAIMQVAVCGSLIGWRNVTRLLVFSTDAGFHFAGDGKLGGIVLPNDGQCHLENNMYTMSHYYDYPSIAHLVQKLSENNIQTIFAVTEEFQPVYKELKNLIPKSAVGTLSANSSNVIQLIIDAYNSLSSEVILENGKLSEGVTISYKSYCKNGVNGTGENGRKCSNISIGDEVQFEISITSNKCPKKDSDSFKIRPLGFTEEVEVILQYICECECQSEGIPESPKCHEGNGTFECGACRCNEGRVGRHCECSTDEVNSEDMDAYCRKENSSEICSNNGECVCGQCVCRKRDNTNEIYSGASNGQICNGRGICECGVCKCTDPKFQGQTCEMCQTCLGVCAEHKECVQCRAFNKGEKKDTCTQECSYFNITKVESRDKLPQPVQPDPVSHCKEKDVDDCWFYFTYSVNGNNEVMVHVVENPECPTGPDIIPIVAGVVAGIVLIGLALLLIWKLLMIIHDRREFAKFEKEKMNAKWDTGENPIYKSAVTTVVNPKYEGK

SEQ ID NO: 306 - protein, 1032 aa, Artificial Sequence [sequence omitted]

SEQ ID NO: 307 - protein, 630 aa, Artificial Sequence
  The SLC3A2 Protein
MELQPPEASIAVVSIPRQLPGSHSEAGVQGLSAGDDSELGSHCVAQTGLELLASGDPLPSASQNAEMIETGSDCVTQAGLQLLASSDPPALASKNAEVTGTMSQDTEVDMKEVELNELEPEKQPMNAASGAAMSLAGAEKNGLVKIKVAEDEAEAAAAAKFTGLSKEELLKVAGSPGWVRTRWALLLLFWLGWLGMLAGAVVIIVRAPRCRELPAQKWWHTGALYRIGDLQAFQGHGAGNLAGLKGRLDYLSSLKVKGLVLGPIHKNQKDDVAQTDLLQIDPNFGSKEDFDSLLQSAKKKSIRVILDLTPNYRGENSWFSTQVDTVATKVKDALEFWLQAGVDGFQVRDIENLKDASSFLAEWQNITKGFSEDRLLIAGTNSSDLQQILSLLESNKDLLLTSSYLSDSGSTGEHTKSLVTQYLNATGNRWCSWSLSQARLLTSFLPAQLLRLYQLMLFTLPGTPVFSYGDEIGLDAAALPGQPMEAPVMLWDESSFPDIPGAVSANMTVKGQSEDPGSLLSLFRRLSDQRSKERSLLHGDFHAFSAGPGLFSYIRHWDQNERFLVVLNFGDVGLSAGLQASDLPASASLPAKADLLLSTQPGREEGSPLELERLKLEPHEGLLLRFPYAA

SEQ ID NO: 308 - protein, 1021 aa, Artificial Sequence
  IGSF2
MAGISYVASFFLLLTKLSIGQREVTVQKGPLFRAEGYPVSIGCNVTGHQGPSEQHFQWSVYLPTNPTQEVQIISTKDAAFSYAVYTQRVRSGDVYVERVQGNSVLLHISKLQMKDAGEYECHTPNTDEKYYGSYSAKTNLIVIPDTLSATMSSQTLGKEEGEPLALTCEASKATAQHTHLSVTWYLTQDGGGSQATEIISLSKDFILVPGPLYTERFAASDVQLNKLGPTTFRLSIERLQSSDQGQLFCEATEWIQDPDETWMFITKKQTDQTTLRIQPAVKDFQVNITADSLFAEGKPLELVCLVVSSGRDPQLQGIWFFNGTEIAHIDAGGVLGLKNDYKERASQGELQVSKLGPKAFSLKIFSLGPEDEGAYRCVVAEVMKTRTGSWQVLQRKQSPDSHVHLRKPAARSVVMSTKNKQQVVWEGETLAFLCKAGGAESPLSVSWWHIPRDQTQPEFVAGMGQDGIVQLGASYGVPSYHGNTRLEKMDWATFQLEITFTAITDSGTYECRVSEKSRNQARDLSWTQKISVTVKSLESSLQVSLMSRQPQVMLTNTFDLSCVVRAGYSDLKVPLTVTWQFQPASSHIFHQLIRITHNGTIEWGNFLSRFQKKTKVSQSLFRSQLLVHDATEEETGVYQCEVEVYDRNSLYNNRPPRASAISHPLRIAVTLPESKLKVNSRSQVQELSINSNTDIECSILSRSNGNLQLAIIWYFSPVSTNASWLKILEMDQTNVIKTGDEFHTPQRKQKFHTEKVSQDLFQLHILNVEDSDRGKYHCAVEEWLLSTNGTWHKLGEKKSGLTELKLKPTGSKVRVSKVYWTENVTEHREVAIRCSLESVGSSATLYSVMWYWNRENSGSKLLVHLQHDGLLEYGEEGLRRHLHCYRSSSTDFVLKLHQVEMEDAGMYWCRVAEWQLHGHPSKWINQASDESQRMVLTVLPSEPTLPSRICSSAPLLYFLFICPFVLLLLLLISLLCLYWKARKLSTLRSNTRKEKALWVDLKEAGGVTTNRREDEEEDEGN

SEQ ID NO: 309 - protein, 1195 aa, Artificial Sequence
  IGSF3
MKCFFPVLSCLAVLGVVSAQRQVTVQEGPLYRTEGSHITIWCNVSGYQGPSEQNFQWSIYLPSSPEREVQIVSTMDSSFPYAIYTQRVRGGKIFIERVQGNSTLLHITDLQARDAGEYECHTPSTDKQYFGSYSAKMNLVVIPDSLQTTAMPQTLHRVEQDPLELTCEVASETIQHSHLSVAWLRQKVGEKPVEVISLSRDFMLHSSSEYAQRQSLGEVRLDKLGRTTFRLTIFHLQPSDQGEFYCEAAEWIQDPDGSWYAMTRKRSEGAVVNVQPTDKEFTVRLETEKRLHTVGEPVEFRCILEAQNVPDRYFAVSWAFNSSLIATMGPNAVPVLNSEFAHREARGQLKVAKESDSVFVLKIYHLRQEDSGKYNCRVTEREKTVTGEFIDKESKRPKNIPIIVLPLKSSISVEVASNASVILEGEDLRFSCSVRTAGRPQGRFSVIWQLVDRQNRRSNIMWLDRDGTVQPGSSYWERSSFGGVQMEQVQPNSFSLGIFNSRKEDEGQYECHVTEWVRAVDGEWQIVGERRASTPISITALEMGFAVTAISRTPGVTYSDSFDLQCIIKPHYPAWVPVSVTWRFQPVGTVEFHDLVTFTRDGGVQWGDRSSSFRTRTAIEKAESSNNVRLSISRASDTEAGKYQCVAELWRKNYNNTWTRLAERTSNLLEIRVLQPVTKLQVSKSKRTLTLVENKPIQLNCSVKSQTSQNSHFAVLWYVHKPSDADGKLILKTTHNSAFEYGTYAEEEGLRARLQFERHVSGGLFSLTVQRAEVSDSGSYYCHVEEWLLSPNYAWYKLAEEVSGRTEVTVKQPDSRLRLSQAQGNLSVLETRQVQLECVVLNRTSITSQLMVEWFVWKPNHPERETVARLSRDATFHYGEQAAKNNLKGRLHLESPSPGVYRLFIQNVAVQDSGTYSCHVEEWLPSPSGMWYKRAEDTAGQTALTVMRPDASLQVDTVVPNATVSEKAAFQLDCSIVSRSSQDSRFAVAWYSLRTKAGGKRSSPGLEEQEEEREEEEEEEEDDDDDDPTERTALLSVGPDAVFGPEGSPWEGRLRFQRLSPVLYRLTVLQASPQDTGNYSCHVEEWLPSPQKEWYRLTEEESAPIGIRVLDTSPTLQSIICSNDALFYFVFFYPFPIFGILIITILLVRFKSRNSSKNSDGKNGVPLLWIKEPHLNYSPTCLEPPVLSIHPGAID

SEQ ID NO: 310 - protein, 1023 aa, Artificial Sequence
  ATP1A1
MGKGVGRDKYEPAAVSEQGDKKGKKGKKDRDMDELKKEVSMDDHKLSLDELHRKYGTDLSRGLTSARAAEILARDGPNALTPPPTTPEWIKFCRQLFGGFSMLLWIGAILCFLAYSIQAATEEEPQNDNLYLGVVLSAVVIITGCFSYYQEAKSSKIMESFKNMVPQQALVIRNGEKMSINAEEVVVGDLVEVKGGDRIPADLRIISANGCKVDNSSLTGESEPQTRSPDFTNENPLETRNIAFFSTNCVEGTARGIVVYTGDRTVMGRIATLASGLEGGQTPIAAEIEHFIHIITGVAVFLGVSFFILSLILEYTWLEAVIFLIGIIVANVPEGLLATVTVCLTLTAKRMARKNCLVKNLEAVETLGSTSTICSDKTGTLTQNRMTVAHMWFDNQIHEADTTENQSGVSFDKTSATWLALSRIAGLCNRAVFQANQENLPILKRAVAGDASESALLKCIELCCGSVKEMRERYAKIVEIPFNSTNKYQLSIHKNPNTSEPQHLLVMKGAPERILDRCSSILLHGKEQPLDEELKDAFQNAYLELGGLGERVLGFCHLFLPDEQFPEGFQFDTDDVNFPIDNLCFVGLISMIDPPRAAVPDAVGKCRSAGIKVIMVTGDHPITAKAIAKGVGIISEGNETVEDIAARLNIPVSQVNPRDAKACVVHGSDLKDMTSEQLDDILKYHTEIVFARTSPQQKLIIVEGCQRQGAIVAVTGDGVNDSPALKKADIGVAMGIAGSDVSKQAADMILLDDNFASIVTGVEEGRLIFDNLKKSIAYTLTSNIPEITPFLIFIIANIPLPLGTVTILCIDLGTDMVPAISLAYEQAESDIMKRQPRNPKTDKLVNERLISMAYGQIGMIQALGGFFTYFVILAENGFLPIHLLGLRVDWDDRWINDVEDSYGQQWTYEQRKIVEFTCHTAFFVSIVVVQWADLVICKTRRNSVFQQGMKNKILIFGLFEETALAAFLSYCPGMGVALRMYPLKPTWWFCAFPYSLLIFVYDEVRKLIIRRRPGGWVEKETYY

SEQ ID NO: 311 - protein, 240 aa, Artificial Sequence
  ATP1A2
MGRGAGREYSPAATTAENGGGKKKQKEKELDELKKEVAMDDHKLSLDELGRKYQVDLSKGLTNQRAQDVLARDGPNALTPPPTTPEWVKFCRQLFGGFSILLWIGAILCFLAYGIQAAMEDEPSNDNLYLGVVLAAVVIVTGCFSYYQEAKSSKIMDSFKNMVPQQALVIREGEKMQINAEEVVVGDLVEVKGGDRVPADLRIISSHGCKVDNSSLTGESEPQTRSPEFTHENPLETRNI

SEQ ID NO: 312 - protein, 780 aa, Artificial Sequence
  ATP1A3
CFFSTNCVEGTARGIVIATGDRTVMGRIATLASGLEVGRTPIAMEIEHFIQLITGVAVFLGVSFFVLSLILGYSWLEAVIFLIGIIVANVPEGLLATVTVCLTLTAKRMARKNCLVKNLEAVETLGSTSTICSDKTGTLTQNRMTVAHMWFDNQIHEADTTEDQSGATFDKRSPTWTALSRIAGLCNRAVFKAGQENISVSKRDTAGDASESALLKCIELSCGSVRKMRDRNPKVAEIPFNSTNKYQLSIHEREDSPQSHVLVMKGAPERILDRCSTILVQGKEIPLDKEMQDAFQNAYMELGGLGERVLGFCQLNLPSGKFPRGFKFDTDELNFPTEKLCFVGLMSMIDPPRAAVPDAVGKCRSAGIKVIMVTGDHPITAKAIAKGVGIISEGNETVEDIAARLNIPMSQVNPREAKACVVHGSDLKDMTSEQLDEILKNHTEIVFARTSPQQKLIIVEGCQRQGAIVAVTGDGVNDSPALKKADIGIAMGISGSDVSKQAADMILLDDNFASIVTGVEEGRLIFDNLKKSIAYTLTSNIPEITPFLLFIIANIPLPLGTVTILCIDLGTDMVPAISLAYEAAESDIMKRQPRNSQTDKLVNERLISMAYGQIGMIQALGGFFTYFVILAENGFLPSRLLGIRLDWDDRTMNDLEDSYGQEWTYEQRKVVEFTCHTAFFASIVVVQWADLIICKTRRNSVFQQGMKNKILIFGLLEETALAAFLSYCPGMGVALRMYPLKVTWWFCAFPYSLLIFIYDEVRKLILRRYPGGWVEKETYY

SEQ ID NO: 313 - protein, 1026 aa, Artificial Sequence
  ATP1A4
MGSGGSDSYRIATSQDKKDDKDSPKKNKGKERRDLDDLKKEVAMTEHKMSVEEVCRKYNTDCVQGLTHSKAQEILARDGPNALTPPPTTPEWVKFCRQLFGGFSILLWIGAILCFLAYGIQAGTEDDPSGDNLYLGIVLAAVVIITGCFSYYQEAKSSKIMESFKNMVPQQALVIREGEKMQVNAEEVVVGDLVEIKGGDRVPADLRIISAHGCKVDNSSLTGESEPQTRSPDCTHDNPLETRNITFFSTNCVEGTARGVVVATGDRTVMGRIATLASGLEVGKTPIAIEIEHFIQLITGVAVFLGVSFFILSLILGYTWLEAVIFLIGIIVANVPEGLLATVTVCLTLTAKRMARKNCLVKNLEAVETLGSTSTICSDKTGTLTQNRMTVAHMWFDNQIHEADTTEDQSGTSFDKSSHTWVALSHIAGLCNRAVFKGGQDNIPVLKRDVAGDASESALLKCIELSSGSVKLMRERNKKVAEIPFNSTNKYQLSIHETEDPNDNRYLLVMKGAPERILDRCSTILLQGKEQPLDEEMKEAFQNAYLELGGLGERVLGFCHYYLPEEQFPKGFAFDCDDVNFTTDNLCFVGLMSMIDPPRAAVPDAVGKCRSAGIKVIMVTGDHPITAKAIAKGVGIISEGNETVEDIAARLNIPVSQVNPRDAKACVIHGTDLKDFTSEQIDEILQNHTEIVFARTSPQQKLIIVEGCQRQGAIVAVTGDGVNDSPALKKADIGVAMGIAGSDVSKQAADMILLDDNFASIVTGVEEGRLIFDNLKKSIAYTLTSNIPEITPFLLFIMANIPLPLGTITILCIDLGTDMVPAISLAYEAAESDIMKRQPRNPRTDKLVNERLISMAYGQIGMIQALGGFFSYFVILAENGFLPGNLVGIRLNWDDRTVNDLEDSYGQQWTYEQRKVVEFTCHTAFFVSIVVVQWADLIICKTRRNSVFQQGMKNKILIFGLFEETALAAFLSYCPGMDVALRMYPLKPSWWFCAFPYSFLIFVYDEIRKLILRRNPGGWVEKETYY

SEQ ID NO: 314 - protein, 1029 aa, Artificial Sequence
  ATP1B3
MGLWGKKGTVAPHDQSPRRRPKKGLIKKKMVKREKQKRNMEELKKEVVMDDHKLTLEELSTKYSVDLTKGHSHQRAKEILTRGGPNTVTPPPTTPEWVKFCKQLFGGFSLLLWTGAILCFVAYSIQIYFNEEPTKDNLYLSIVLSVVVIVTGCFSYYQEAKSSKIMESFKNMVPQQALVIRGGEKMQINVQEVVLGDLVEIKGGDRVPADLRLISAQGCKVDNSSLTGESEPQSRSPDFTHENPLETRNICFFSTNCVEGTARGIVIATGDSTVMGRIASLTSGLAVGQTPIAAEIEHFIHLITVVAVFLGVTFFALSLLLGYGWLEAIIFLIGIIVANVPEGLLATVTVCLTLTAKRMARKNCLVKNLEAVETLGSTSTICSDKTGTLTQNRMTVAHMWFDMTVYEADTTEEQTGKTFTKSSDTWFMLARIAGLCNRADFKANQEILPIAKRATTGDASESALLKFIEQSYSSVAEMREKNPKVAEIPFNSTNKYQMSIHLREDSSQTHVLMMKGAPERILEFCSTFLLNGQEYSMNDEMKEAFQNAYLELGGLGERVLGFCFLNLPSSFSKGFPFNTDEINFPMDNLCFVGLISMIDPPRAAVPDAVSKCRSAGIKVIMVTGDHPITAKAIAKGVGIISEGTETAEEVAARLKIPISKVDASAAKAIVVHGAELKDIQSKQLDQILQNHPEIVFARTSPQQKLIIVEGCQRLGAVVAVTGDGVNDSPALKKADIGIAMGISGSDVSKQAADMILLDDNFASIVTGVEEGRLIFDNLKKSIMYTLTSNIPEITPFLMFIILGIPLPLGTITILCIDLGTDMVPAISLAYESAESDIMKRLPRNPKTDNLVNHRLIGMAYGQIGMIQALAGFFTYFVILAENGFRPVDLLGIRLHWEDKYLNDLEDSYGQQWTYEQRKVVEFTCQTAFFVTIVVVQWADLIISKTRRNSLFQQGMRNKVLIFGILEETLLAAFLSYTPGMDVALRMYPLKITWWLCAIPYSILIFVYDEIRKLLIRQHPDGWVERETYY

SEQ ID NO: 315 - protein, 279 aa, Artificial Sequence
  ATP2B1
MTKNEKKSLNQSLAEWKLFIYNPTTGEFLGRTAKSWGLILLFYLVFYGFLAALFSFTMWVMLQTLNDEVPKYRDQIPSPGLMVFPKPVTALEYTFSRSDPTSYAGYIEDLKKFLKPYTLEEQKNLTVCPDGALFEQKGPVYVACQFPISLLQACSGMNDPDFGYSQGNPCILVKMNRIIGLKPEGVPRIDCVSKNEDIPNVAVYPHNGMIDLKYFPYYGKKLHVGYLQPLVAVQVSFAPNNTGKEVTVECKIDGSANLKSQDDRDKFLGRVMFKITARA

SEQ ID NO: 316 - protein, 1258 aa, Artificial Sequence
  ATP2B2
MGDMANNSVAYSGVKNSLKEANHDGDFGITLAELRALMELRSTDALRKIQESYGDVYGICTKLKTSPNEGLSGNPADLERREAVFGKNFIPPKKPKTFLQLVWEALQDVTLIILEIAAIVSLGLSFYQPPEGDNALCGEVSVGEEEGEGETGWIEGAAILLSVVCVVLVTAFNDWSKEKQFRGLQSRIEQEQKFTVIRGGQVIQIPVADITVGDIAQVKYGDLLPADGILIQGNDLKIDESSLTGESDHVKKSLDKDPLLLSGTHVMEGSGRMVVTAVGVNSQTGIIFTLLGAGGEEEEKKDEKKKEKKNKKQDGAIENRNKAKAQDGAAMEMQPLKSEEGGDGDEKDKKKANLPKKEKSVLQGKLTKLAVQIGKAGLLMSAITVIILVLYFVIDTFWVQKRPWLAECTPIYIQYFVKFFIIGVTVLVVAVPEGLPLAVTISLAYSVKKMMKDNNLVRHLDACETMGNATAICSDKTGTLTMNRMTVVQAYINEKHYKKVPEPEAIPPNILSYLVTGISVNCAYTSKILPPEKEGGLPRHVGNKTECALLGLLLDLKRDYQDVRNEIPEEALYKVYTFNSVRKSMSTVLKNSDGSYRIFSKGASEIILKKCFKILSANGEAKVFRPRDRDDIVKTVIEPMASEGLRTICLAFRDFPAGEPEPEWDNENDIVTGLTCIAVVGIEDPVRPEVPDAIKKCQRAGITVRMVTGDNINTARAIATKCGILHPGEDFLCLEGKDFNRRIRNEKGEIEQERIDKIWPKLRVLARSSPTDKHTLVKGIIDSTVSDQRQVVAVTGDGTNDGPALKKADVGFAMGIAGTDVAKEASDIILTDDNFTSIVKAVMWGRNVYDSISKFLQFQLTVNVVAVIVAFTGACITQDSPLKAVQMLWVNLIMDTLASLALATEPPTESLLLRKPYGRNKPLISRTMMKNILGHAFYQLVVVFTLLFAGEKFFDIDSGRNAPLHAPPSEHYTIVFNTFVLMQLFNEINARKIHGERNVFEGIFNNAIFCTIVLGTFVVQIIIVQFGGKPFSCSELSIEQWLWSIFLGMGTLLWGQLISTIPTSRLKFLKEAGHGTQKEEIPEEELAEDVEEIDHAERELRRGQILWFRGLNRIQTQMDVVNAFQSGSSIQGALRRQPSIASQHHDVTNISTPTHIRVVNAFRSSLYEGLEKPESRSSIHNFMTHPEFRIEDSEPHIPLIDDTDAEDDAPTKRNSSPPPSPNKNNNAVDSGIHLTIEMNKSATSSSPGSPLHSLETSL

SEQ ID NO: 317 - protein, 1272 aa, Artificial Sequence
  ATP2B3
MGDMTNSDFYSKNQRNESSHGGEFGCTMEELRSLMELRGTEAVVKIKETYGDTEAICRRLKTSPVEGLPGTAPDLEKRKQIFGQNFIPPKKPKTFLQLVWEALQDVTLIILEIAAIISLGLSFYHPPGEGNEGCATAQGGAEDEGEAEAGWIEGAAILLSVICVVLVTAFNDWSKEKQFRGLQSRIEQEQKFTVVRAGQVVQIPVAEIVVGDIAQVKYGDLLPADGLFIQGNDLKIDESSLTGESDQVRKSVDKDPMLLSGTHVMEGSGRMLVTAVGVNSQTGIIFTLLGAGGEEEEKKDKKGVKKGDGLQLPAADGAAASNAADSANASLVNGKMQDGNVDASQSKAKQQDGAAAMEMQPLKSAEGGDADDRKKASMHKKEKSVLQGKLTKLAVQIGKAGLVMSAITVIILVLYFTVDTFVVNKKPWLPECTPVYVQYFVKFFIIGVTVLVVAVPEGLPLAVTISLAYSVKKMMKDNNLVRHLDACETMGNATAICSDKTGTLTTNRMTVVQAYVGDVHYKEIPDPSSINTKTMELLINAIAINSAYTTKILPPEKEGALPRQVGNKTECGLLGFVLDLKQDYEPVRSQMPEEKLYKVYTFNSVRKSMSTVIKLPDESFRMYSKGASEIVLKKCCKILNGAGEPRVFRPRDRDEMVKKVIEPMACDGLRTICVAYRDFPSSPEPDWDNENDILNELTCICVVGIEDPVRPEVPEAIRKCQRAGITVRMVTGDNINTARAIAIKCGIIHPGEDFLCLEGKEFNRRIRNEKGEIEQERIDKIWPKLRVLARSSPTDKHTLVKGIIDSTHTEQRQVVAVTGDGTNDGPALKKADVGFAMGIAGTDVAKEASDIILTDDNFSSIVKAVMWGRNVYDSISKFLQFQLTVNVVAVIVAFTGACITQDSPLKAVQMLWVNLIMDTFASLALATEPPTETLLLRKPYGRNKPLISRTMMKNILGHAVYQLALIFTLLFVGEKMFQIDSGRNAPLHSPPSEHYTIIFNTFVMMQLFNEINARKIHGERNVFDGIFRNPIFCTIVLGTFAIQIVIVQFGGKPFSCSPLQLDQWMWCIFIGLGELVWGQVIATIPTSRLKFLKEAGRLTQKEEIPEEELNEDVEEIDHAERELRRGQILWFRGLNRIQTQIEVVNTFKSGASFQGALRRQSSVTSQSQDIRVVKAFRSSLYEGLEKPESRTSIHNFMAHPEFRIEDSQPHIPLIDDTDLEEDAALKQNSSPPSSLNKNNSAIDSGINLTTDTSKSATSSSPGSPIHSLETSL

SEQ ID NO: 318 - protein, 874 aa, Artificial Sequence
  ATP2B4
MGDMANSSIEFHPKPQQQRDVPQAGGFGCTLAELRTLMELRGAEALQKIEEAYGDVSGLCRRLKTSPTEGLADNTNDLEKRRQIYGQNFIPPKQPKTFLQLVWEALQDVTLIILEVAAIVSLGLSFYAPPGEESEACGNVSGGAEDEGEAEAGWIEGAAILLSVICVVLVTAFNDWSKEKQFRGLQSRIEQEQKFTVIRNGQLLQVPVAALVVGDIAQVKYGDLLPADGVLIQANDLKIDESSLTGESDHVRKSADKDPMLLSGTHVMEGSGRMVVTAVGVNSQTGIIFTLLGAGGEEEEKKDKKGKQQDGAMESSQTKAKKQDGAVAMEMQPLKSAEGGEMEEREKKKANAPKKEKSVLQGKLTKLAVQIGKAGLVMSAITVIILVLYFVIETFVVEGRTWLAECTPVYVQYFVKFFIIGVTVLVVAVPEGLPLAVTISLAYSVKKMMKDNNLVRHLDACETMGNATAICSDKTGTLTTNRMTVVQSYLGDTHYKEIPAPSALTPKILDLLVHAISINSAYTTKILPPEKEGALPRQVGNKTECALLGFVLDLKRDFQPVREQIPEDKLYKVYTFNSVRKSMSTVIRMPDGGFRLFSKGASEILLKKCTNILNSNGELRGFRPRDRDDMVRKIIEPMACDGLRTICIAYRDFSAGQEPDWDNENEVVGDLTCIAVVGIEDPVRPEVPEAIRKCQRAGITVRMVTGDNINTARAIAAKCGIIQPGEDFLCLEGKEFNRRIRNEKGEIEQERLDKVWPKLRVLARSSPTDKHTLVKGIIDSTTGEQRQVVAVTGDGTNDGPALKKADVGFAMGIAGTDVAKEASDIILTDDNFTSIVKAVMWGRNVYDSISKFLQFQLTVNVVAVIVAFTGACIT

SEQ ID NO: 319 - protein, 731 aa, Artificial Sequence
  PTGFRN Protein Fragment #1
PSARPPPSLSLREGEPFELRCTAASASPLHTHLALLWEVHRGPARRSVLALTHEGRFHPGLGYEQRYHSGDVRLDTVGSDAYRLSVSRALSADQGSYRCIVSEWIAEQGNWQEIQEKAVEVATVVIQPSVLRAAVPKNVSVAEGKELDLTCNITTDRADDVRPEVTWSFSRMPDSTLPGSRVLARLDRDSLVHSSPHVALSHVDARSYHLLVRDVSKENSGYYYCHVSLWAPGHNRSWHKVAEAVSSPAGVGVTWLEPDYQVYLNASKVPGFADDPTELACRVVDTKSGEANVRFTVSWYYRMNRRSDNVVTSELLAVMDGDWTLKYGERSKQRAQDGDFIFSKEHTDTFNFRIQRTTEEDRGNYYCVVSAWTKQRNNSWVKSKDVFSKPVNIFWALEDSVLVVKARQPKPFFAAGNTFEMTCKVSSKNIKSPRYSVLIMAEKPVGDLSSPNETKYIISLDQDSVVKLENWTDASRVDGVVLEKVQEDEFRYRMYQTQVSDAGLYRCMVTAWSPVRGSLWREAATSLSNPIEIDFQTSGPIFNASVHSDTPSVIRGDLIKLFCIITVEGAALDPDDMAFDVSWFAVHSFGLDKAPVLLSSLDRKGIVTTSRRDWKSDLSLERVSVLEFLLQVHGSEDQDFGNYYCSVTPWVKSPTGSWQKEAEIHSKPVFITVKMDVLNAFKYPLLIGVGLSTVIGLLSCLIGYCSSHWCCKKEVQETRRERRRLMSMEMD

SEQ ID NO: 320 - protein, 611 aa, Artificial Sequence
  PTGFRN Protein Fragment #2
VATVVIQPSVLRAAVPKNVSVAEGKELDLTCNITTDRADDVRPEVTWSFSRMPDSTLPGSRVLARLDRDSLVHSSPHVALSHVDARSYHLLVRDVSKENSGYYYCHVSLWAPGHNRSWHKVAEAVSSPAGVGVTWLEPDYQVYLNASKVPGFADDPTELACRVVDTKSGEANVRFTVSWYYRMNRRSDNVVTSELLAVMDGDWTLKYGERSKQRAQDGDFIFSKEHTDTFNFRIQRTTEEDRGNYYCVVSAWTKQRNNSWVKSKDVFSKPVNIFWALEDSVLVVKARQPKPFFAAGNTFEMTCKVSSKNIKSPRYSVLIMAEKPVGDLSSPNETKYIISLDQDSVVKLENWTDASRVDGVVLEKVQEDEFRYRMYQTQVSDAGLYRCMVTAWSPVRGSLWREAATSLSNPIEIDFQTSGPIFNASVHSDTPSVIRGDLIKLFCIITVEGAALDPDDMAFDVSWFAVHSFGLDKAPVLLSSLDRKGIVTTSRRDWKSDLSLERVSVLEFLLQVHGSEDQDFGNYYCSVTPWVKSPTGSWQKEAEIHSKPVFITVKMDVLNAFKYPLLIGVGLSTVIGLLSCLIGYCSSHWCCKKEVQETRRERRRLMSMEMD

SEQ ID NO: 321 - protein, 485 aa, Artificial Sequence
  PTGFRN Protein Fragment #3
SPAGVGVTWLEPDYQVYLNASKVPGFADDPTELACRVVDTKSGEANVRFTVSWYYRMNRRSDNVVTSELLAVMDGDWTLKYGERSKQRAQDGDFIFSKEHTDTFNFRIQRTTEEDRGNYYCVVSAWTKQRNNSWVKSKDVFSKPVNIFWALEDSVLVVKARQPKPFFAAGNTFEMTCKVSSKNIKSPRYSVLIMAEKPVGDLSSPNETKYIISLDQDSVVKLENWTDASRVDGVVLEKVQEDEFRYRMYQTQVSDAGLYRCMVTAWSPVRGSLWREAATSLSNPIEIDFQTSGPIFNASVHSDTPSVIRGDLIKLFCIITVEGAALDPDDMAFDVSWFAVHSFGLDKAPVLLSSLDRKGIVTTSRRDWKSDLSLERVSVLEFLLQVHGSEDQDFGNYYCSVTPWVKSPTGSWQKEAEIHSKPVFITVKMDVLNAFKYPLLIGVGLSTVIGLLSCLIGYCSSHWCCKKEVQETRRERRRLMSMEMD

SEQ ID NO: 322 - protein, 343 aa, Artificial Sequence
  PTGFRN Protein Fragment #4
KPVNIFWALEDSVLVVKARQPKPFFAAGNTFEMTCKVSSKNIKSPRYSVLIMAEKPVGDLSSPNETKYIISLDQDSVVKLENWTDASRVDGVVLEKVQEDEFRYRMYQTQVSDAGLYRCMVTAWSPVRGSLWREAATSLSNPIEIDFQTSGPIFNASVHSDTPSVIRGDLIKLFCIITVEGAALDPDDMAFDVSWFAVHSFGLDKAPVLLSSLDRKGIVTTSRRDWKSDLSLERVSVLEFLLQVHGSEDQDFGNYYCSVTPWVKSPTGSWQKEAEIHSKPVFITVKMDVLNAFKYPLLIGVGLSTVIGLLSCLIGYCSSHWCCKKEVQETRRERRRLMSMEMD

SEQ ID NO: 323 - protein, 217 aa, Artificial Sequence
  PTGFRN Protein Fragment #5
VRGSLWREAATSLSNPIEIDFQTSGPIFNASVHSDTPSVIRGDLIKLFCIITVEGAALDPDDMAFDVSWFAVHSFGLDKAPVLLSSLDRKGIVTTSRRDWKSDLSLERVSVLEFLLQVHGSEDQDFGNYYCSVTPWVKSPTGSWQKEAEIHSKPVFITVKMDVLNAFKYPLLIGVGLSTVIGLLSCLIGYCSSHWCCKKEVQETRRERRRLMSMEMD

SEQ ID NO: 324 - protein, 66 aa, Artificial Sequence
  PTGFRN Protein Fragment #6
SKPVFITVKMDVLNAFKYPLLIGVGLSTVIGLLSCLIGYCSSHWCCKKEVQETRRERRRLMSMEMD

SEQ ID NO: 325 - protein, 21 aa, Artificial Sequence
  PTGFRN Protein - Signal Peptide
MGRLASRPLLLALLSLALCRG

SEQ ID NO: 326 - protein, 247 aa, Artificial Sequence
  BSG Protein Fragment #1
PGTVFTTVEDLGSKILLTCSLNDSATEVTGHRWLKGGVVLKEDALPGQKTEFKVDSDDQWGEYSCVFLPEPMGTANIQLHGPPRVKAVKSSEHINEGETAMLVCKSESVPPVTDWAWYKITDSEDKALMNGSESRFFVSSSQGRSELHIENLNMEADPGQYRCNGTSSKGSDQAIITLRVRSHLAALWPFLGIVAEVLVLVTIIFIYEKRRKPEDVLDDDDAGSAPLKSSGQHQNDKGKNVRQRNSS

SEQ ID NO: 327 - protein, 168 aa, Artificial Sequence
  BSG Protein Fragment #2
HGPPRVKAVKSSEHINEGETAMLVCKSESVPPVTDWAWYKITDSEDKALMNGSESRFFVSSSQGRSELHIENLNMEADPGQYRCNGTSSKGSDQAIITLRVRSHLAALWPFLGIVAEVLVLVTIIFIYEKRRKPEDVLDDDDAGSAPLKSSGQHQNDKGKNVRQRNSS

SEQ ID NO: 328 - protein, 66 aa, Artificial Sequence
  BSG Protein Fragment #3
SHLAALWPFLGIVAEVLVLVTIIFIYEKRRKPEDVLDDDDAGSAPLKSSGQHQNDKGKNVRQRNSS

SEQ ID NO: 329 - protein, 18 aa, Artificial Sequence
  BSG Protein - Signal Peptide
MAAALFVLLGFALLGTHG

SEQ ID NO: 330 - protein, 456 aa, Artificial Sequence
  IGSF8 Protein Fragment #1
APPGPRGRQAPTSPPRMTVHEGQELALGCLARTSTQKHTHLAVSFGRSVPEAPVGRSTLQEVVGIRSDLAVEAGAPYAERLAAGELRLGKEGTDRYRMVVGGAQAGDAGTYHCTAAEWIQDPDGSWAQIAEKRAVLAHVDVQTLSSQLAVTVGPGERRIGPGEPLELLCNVSGALPPAGRHAAYSVGWEMAPAGAPGPGRLVAQLDTEGVGSLGPGYEGRHIAMEKVASRTYRLRLEAARPGDAGTYRCLAKAYVRGSGTRLREAASARSRPLPVHVREEGVVLEAVAWLAGGTVYRGETASLLCNISVRGGPPGLRLAASWWVERPEDGELSSVPAQLVGGVGQDGVAELGVRPGGGPVSVELVGPRSHRLRLHSLGPEDEGVYHCAPSAWVQHADYSWYQAGSARSGPVTVYPYMHALDTLFVPLLVGTGVALVTGATVLGTITCCFMKRLRKR

SEQ ID NO: 331 - protein, 320 aa, Artificial Sequence
  IGSF8 Protein Fragment #2
AHVDVQTLSSQLAVTVGPGERRIGPGEPLELLCNVSGALPPAGRHAAYSVGWEMAPAGAPGPGRLVAQLDTEGVGSLGPGYEGRHIAMEKVASRTYRLRLEAARPGDAGTYRCLAKAYVRGSGTRLREAASARSRPLPVHVREEGVVLEAVAWLAGGTVYRGETASLLCNISVRGGPPGLRLAASWWVERPEDGELSSVPAQLVGGVGQDGVAELGVRPGGGPVSVELVGPRSHRLRLHSLGPEDEGVYHCAPSAWVQHADYSWYQAGSARSGPVTVYPYMHALDTLFVPLLVGTGVALVTGATVLGTITCCFMKRLRKR

SEQ ID NO: 332 - protein, 179 aa, Artificial Sequence
  IGSF8 Protein Fragment #3
REEGVVLEAVAWLAGGTVYRGETASLLCNISVRGGPPGLRLAASWWVERPEDGELSSVPAQLVGGVGQDGVAELGVRPGGGPVSVELVGPRSHRLRLHSLGPEDEGVYHCAPSAWVQHADYSWYQAGSARSGPVTVYPYMHALDTLFVPLLVGTGVALVTGATVLGTITCCFMKRLRKR

SEQ ID NO: 333 - protein, 24 aa, Artificial Sequence
  IGSF8 Protein Fragment #4
VALVTGATVLGTITCCFMKRLRKR

SEQ ID NO: 334 - protein, 27 aa, Artificial Sequence
  IGSF8 Protein - Signal Peptide
MGALRPTLLPPSLPLLLLLMLGMGCWA

SEQ ID NO: 335-400 - skipped (66 entries)

SEQ ID NO: 401 - protein, 332 aa, Artificial Sequence
  The MARCKS protein
MGAQFSKTAAKGEAAAERPGEAAVASSPSKANGQENGHVKVNGDASPAAAESGAKEELQANGSAPAADKEEPAAAGSGAASPSAAEKGEPAAAAAPEAGASPVEKEAPAEGEAAEPGSPTAAEGEAASAASSTSSPKAEDGATPSPSNETPKKKKKRFSFKKSFKLSGFSFKKNKKEAGEGGEAEAPAAEGGKDEAAGGAAAAAAEAGAASGEQAAAPGEEAAAGEEGAAGGDPQEAKPQEAAVAPEKPPASDETKAAEEPSKVEEKKAEEAGASAAACEAPSAAGPGAPPEQEAAPAEEPAAAAASSACAAPSQEAQPECSPEAPPAEAAE

SEQ ID NO: 402 - protein, 195 aa, Artificial Sequence
  The MARCKSL1 protein
MGSQSSKAPRGDVTAEEAAGASPAKANGQENGHVKSNGDLSPKGEGESPPVNGTDEAAGATGDAIEPAPPSQGAEAKGEVPPKETPKKKKKFSFKKPFKLSGLSFKRNRKEGGGDSSASSPTEEEQEQGEIGACSDEGTAQEGKAAATPESQEPQAKGAEASAASEEEAGPQATEPSTPSGPESGPTPASAEQNE

SEQ ID NO: 403 - protein, 227 aa, Artificial Sequence
  The BASP1 protein
MGGKLSKKKKGYNVNDEKAKEKDKKAEGAATEEEGTPKESEPQAAAEPAEAKEGKEKPDQDAEGKAEEKEGEKDAAAAKEEAPKAEPEKTEGAAEAKAEPPKAPEQEQAAPGPAAGGEAPKAAEAAAAPAESAAPAAGEEPSKEEGEPKKTEAPAAPAAQETKSDGAPASDSKPGSSEAAPSSKETPAATEAPSSTPKAQGPAASAEEPKPVEAPAANSDQTVTVKE

SEQ ID NO: 404 - protein, 8 aa, Artificial Sequence
  Synthetic Peptide
  misc_feature (2)..(2): Wherein Xaa can be Alanine or any other Amino Acid
GXKLSKKK

SEQ ID NO: 405 - protein, 4 aa, Artificial Sequence
  Synthetic Peptide
KKKK

SEQ ID NO: 406 - protein, 5 aa, Artificial Sequence
  Synthetic Peptide
KKKKK

SEQ ID NO: 407 - protein, 4 aa, Artificial Sequence
  Synthetic Peptide
RRRR

SEQ ID NO: 408 - protein, 5 aa, Artificial Sequence
  Synthetic Peptide
RRRRR

SEQ ID NO: 409 - protein, 4 aa, Artificial Sequence
  Synthetic Peptide
  misc_feature (1)..(4): Wherein Xaa can be Lys or Arg
XXXX

SEQ ID NO: 410 - protein, 5 aa, Artificial Sequence
  Synthetic Peptide
  misc_feature (1)..(5): Wherein Xaa can be Lys or Arg
XXXXX

SEQ ID NO: 411 - protein, 7 aa, Artificial Sequence
  Synthetic Peptide
GGKLSKK

SEQ ID NO: 412 - protein, 7 aa, Artificial Sequence
  Synthetic Peptide
GAKLSKK

SEQ ID NO: 413 - protein, 7 aa, Artificial Sequence
  Synthetic Peptide
GGKQSKK

SEQ ID NO: 414 - protein, 7 aa, Artificial Sequence
  Synthetic Peptide
GGKLAKK

SEQ ID NO: 415 - protein, 6 aa, Artificial Sequence
  Synthetic Peptide
GGKLSK

SEQ ID NO: 416 - protein, 6 aa, Artificial Sequence
  Synthetic Peptide
GAKLSK

SEQ ID NO: 417 - protein, 6 aa, Artificial Sequence
  Synthetic Peptide
GGKQSK

SEQ ID NO: 418 - protein, 6 aa, Artificial Sequence
  Synthetic Peptide
GGKLAK

SEQ ID NO: 419 - protein, 4 aa, Artificial Sequence
  Synthetic Peptide
KKKG

SEQ ID NO: 420 - protein, 5 aa, Artificial Sequence
  Synthetic Peptide
KKKGY

SEQ ID NO: 421 - protein, 6 aa, Artificial Sequence
  Synthetic Peptide
KKKGYN

SEQ ID NO: 422 - protein, 7 aa, Artificial Sequence
  Synthetic Peptide
KKKGYNV

SEQ ID NO: 423 - protein, 8 aa, Artificial Sequence
  Synthetic Peptide
KKKGYNVN

SEQ ID NO: 424 - protein, 6 aa, Artificial Sequence
  Synthetic Peptide
KKKGYS

SEQ ID NO: 425 - protein, 6 aa, Artificial Sequence
  Synthetic Peptide
KKKGYG

SEQ ID NO: 426 - protein, 7 aa, Artificial Sequence
  Synthetic Peptide
KKKGYGG

SEQ ID NO: 427 - protein, 5 aa, Artificial Sequence
  Synthetic Peptide
KKKGS

SEQ ID NO: 428 - protein, 6 aa, Artificial Sequence
  Synthetic Peptide
KKKGSG

SEQ ID NO: 429 - protein, 7 aa, Artificial Sequence
  Synthetic Peptide
KKKGSGS

SEQ ID NO: 430 - protein, 4 aa, Artificial Sequence
  Synthetic Peptide
KKKS

SEQ ID NO: 431 - protein, 5 aa, Artificial Sequence
  Synthetic Peptide
KKKSG

SEQ ID NO: 432 - protein, 6 aa, Artificial Sequence
  Synthetic Peptide
KKKSGG

SEQ ID NO: 433 - protein, 7 aa, Artificial Sequence
  Synthetic Peptide
KKKSGGS

SEQ ID NO: 434 - protein, 8 aa, Artificial Sequence
  Synthetic Peptide
KKKSGGSG

SEQ ID NO: 435 - protein, 8 aa, Artificial Sequence
  Synthetic Peptide
KKSGGSGG

SEQ ID NO: 436 - protein, 10 aa, Artificial Sequence
  Synthetic Peptide
KKKSGGSGGS

SEQ ID NO: 437 - protein, 8 aa, Artificial Sequence
  Synthetic Peptide
KRFSFKKS

SEQ ID NO: 438 - protein, 8 aa, Artificial Sequence
  Synthetic Peptide
GGKLSKKK

SEQ ID NO: 439 - protein, 8 aa, Artificial Sequence
  Synthetic Peptide
GGKLSKKS

SEQ ID NO: 440 - protein, 8 aa, Artificial Sequence
  Synthetic Peptide
GAKLSKKK

SEQ ID NO: 441 - protein, 8 aa, Artificial Sequence
  Synthetic Peptide
GAKLSKKS

SEQ ID NO: 442 - protein, 8 aa, Artificial Sequence
  Synthetic Peptide
GGKQSKKK

SEQ ID NO: 443 - protein, 8 aa, Artificial Sequence
  Synthetic Peptide
GGKQSKKS

SEQ ID NO: 444 - protein, 8 aa, Artificial Sequence
  Synthetic Peptide
GGKLAKKK

SEQ ID NO: 445 - protein, 8 aa, Artificial Sequence
  Synthetic Peptide
GGKLAKKS

SEQ ID NO: 446 - protein, 14 aa, Artificial Sequence
  Synthetic Peptide
GGKLSKKKKGYNVN

SEQ ID NO: 447 - protein, 14 aa, Artificial Sequence
  Synthetic Peptide
GAKLSKKKKGYNVN

SEQ ID NO: 448 - protein, 14 aa, Artificial Sequence
  Synthetic Peptide
GGKQSKKKKGYNVN

SEQ ID NO: 449 - protein, 14 aa, Artificial Sequence
  Synthetic Peptide
GGKLAKKKKGYNVN

SEQ ID NO: 450 - protein, 14 aa, Artificial Sequence
  Synthetic Peptide
GGKLSKKKKGYSGG

SEQ ID NO: 451 - protein, 14 aa, Artificial Sequence
  Synthetic Peptide
GGKLSKKKKGSGGS

SEQ ID NO: 452 - protein, 14 aa, Artificial Sequence
  Synthetic Peptide
GGKLSKKKKSGGSG

SEQ ID NO: 453 - protein, 14 aa, Artificial Sequence
  Synthetic Peptide
GGKLSKKKSGGSGG

SEQ ID NO: 454 - protein, 14 aa, Artificial Sequence
  Synthetic Peptide
GGKLSKKSGGSGGS

SEQ ID NO: 455 - protein, 14 aa, Artificial Sequence
  Synthetic Peptide
GGKLSKSGGSGGSV

SEQ ID NO: 456 - protein, 14 aa, Artificial Sequence
  Synthetic Peptide
GAKKSKKRFSFKKS

SEQ ID NO: 457 - protein, 29 aa, Artificial Sequence
  Synthetic Peptide
GGKLSKKKKGYNVNDEKAKEKDKKAEGAA

SEQ ID NO: 458 - protein, 28 aa, Artificial Sequence
  Synthetic Peptide
GGKLSKKKKGYNVNDEKAKEKDKKAEGA

SEQ ID NO: 459 - protein, 27 aa, Artificial Sequence
  Synthetic Peptide
GGKLSKKKKGYNVNDEKAKEKDKKAEG

SEQ ID NO: 460 - protein, 26 aa, Artificial Sequence
  Synthetic Peptide
GGKLSKKKKGYNVNDEKAKEKDKKAE

SEQ ID NO: 461 - protein, 25 aa, Artificial Sequence
  Synthetic Peptide
GGKLSKKKKGYNVNDEKAKEKDKKA

SEQ ID NO: 462 - protein, 24 aa, Artificial Sequence
  Synthetic Peptide
GGKLSKKKKGYNVNDEKAKEKDKK

SEQ ID NO: 463 - protein, 23 aa, Artificial Sequence
  Synthetic Peptide
GGKLSKKKKGYNVNDEKAKEKDK

SEQ ID NO: 464 - protein, 22 aa, Artificial Sequence
  Synthetic Peptide
GGKLSKKKKGYNVNDEKAKEKD

SEQ ID NO: 465 - protein, 21 aa, Artificial Sequence
  Synthetic Peptide
GGKLSKKKKGYNVNDEKAKEK

SEQ ID NO: 466 - protein, 20 aa, Artificial Sequence
  Synthetic Peptide
GGKLSKKKKGYNVNDEKAKE

SEQ ID NO: 467 - protein, 19 aa, Artificial Sequence
  Synthetic Peptide
GGKLSKKKKGYNVNDEKAK

SEQ ID NO: 468 - protein, 18 aa, Artificial Sequence
  Synthetic Peptide
GGKLSKKKKGYNVNDEKA

SEQ ID NO: 469 - protein, 17 aa, Artificial Sequence
  Synthetic Peptide
GGKLSKKKKGYNVNDEK

SEQ ID NO: 470 - protein, 16 aa, Artificial Sequence
  Synthetic Peptide
GGKLSKKKKGYNVNDE

SEQ ID NO: 471 - protein, 15 aa, Artificial Sequence
  Synthetic Peptide
GGKLSKKKKGYNVND

SEQ ID NO: 472 - protein, 13 aa, Artificial Sequence
  Synthetic Peptide
GGKLSKKKKGYNV

SEQ ID NO: 473 - protein, 12 aa, Artificial Sequence
  Synthetic Peptide
GGKLSKKKKGYN

SEQ ID NO: 474 - protein, 11 aa, Artificial Sequence
  Synthetic Peptide
GGKLSKKKKGY

SEQ ID NO: 475 - protein, 10 aa, Artificial Sequence
  Synthetic Peptide
GGKLSKKKKG

SEQ ID NO: 476 - protein, 9 aa, Artificial Sequence
  Synthetic Peptide
GGKLSKKKK

SEQ ID NO: 477 - protein, 29 aa, Artificial Sequence
  Synthetic Peptide
GAKKSKKRFSFKKSFKLSGFSFKKNKKEA

SEQ ID NO: 478 - protein, 28 aa, Artificial Sequence
  Synthetic Peptide
GAKKSKKRFSFKKSFKLSGFSFKKNKKE

SEQ ID NO: 479 - protein, 27 aa, Artificial Sequence
  Synthetic Peptide
GAKKSKKRFSFKKSFKLSGFSFKKNKK

SEQ ID NO: 480 - protein, 26 aa, Artificial Sequence
  Synthetic Peptide
GAKKSKKRFSFKKSFKLSGFSFKKNK

SEQ ID NO: 481 - protein, 25 aa, Artificial Sequence
  Synthetic Peptide
GAKKSKKRFSFKKSFKLSGFSFKKN

SEQ ID NO: 482 - protein, 24 aa, Artificial Sequence
  Synthetic Peptide
GAKKSKKRFSFKKSFKLSGFSFKK

SEQ ID NO: 483 - protein, 23 aa, Artificial Sequence
  Synthetic Peptide
GAKKSKKRFSFKKSFKLSGFSFK

SEQ ID NO: 484 - protein, 22 aa, Artificial Sequence
  Synthetic Peptide
GAKKSKKRFSFKKSFKLSGFSF

SEQ ID NO: 485 - protein, 21 aa, Artificial Sequence
  Synthetic Peptide
GAKKSKKRFSFKKSFKLSGFS

SEQ ID NO: 486 - protein, 20 aa, Artificial Sequence
  Synthetic Peptide
GAKKSKKRFSFKKSFKLSGF

SEQ ID NO: 487 - protein, 19 aa, Artificial Sequence
  Synthetic Peptide
GAKKSKKRFSFKKSFKLSG

SEQ ID NO: 488 - protein, 18 aa, Artificial Sequence
  Synthetic Peptide
GAKKSKKRFSFKKSFKLS

SEQ ID NO: 489 - protein, 17 aa, Artificial Sequence
  Synthetic Peptide
GAKKSKKRFSFKKSFKL

SEQ ID NO: 490 - protein, 16 aa, Artificial Sequence
  Synthetic Peptide
GAKKSKKRFSFKKSFK

SEQ ID NO: 491 - protein, 15 aa, Artificial Sequence
  Synthetic Peptide
GAKKSKKRFSFKKSF

SEQ ID NO: 492 - protein, 13 aa, Artificial Sequence
  Synthetic Peptide
GAKKSKKRFSFKK

SEQ ID NO: 493 - protein, 12 aa, Artificial Sequence
  Synthetic Peptide
GAKKSKKRFSFK

SEQ ID NO: 494 - protein, 11 aa, Artificial Sequence
  Synthetic Peptide
GAKKSKKRFSF

SEQ ID NO: 495 - protein, 10 aa, Artificial Sequence
  Synthetic Peptide
GAKKSKKRFS

SEQ ID NO: 496 - protein, 9 aa, Artificial Sequence
  Synthetic Peptide
GAKKSKKRF

SEQ ID NO: 497 - protein, 8 aa, Artificial Sequence
  Synthetic Peptide
GAKKSKKR

SEQ ID NO: 498 - protein, 7 aa, Artificial Sequence
  Synthetic Peptide
GAKKSKK

SEQ ID NO: 499 - protein, 29 aa, Artificial Sequence
  Synthetic Peptide
GAKKAKKRFSFKKSFKLSGFSFKKNKKEA

SEQ ID NO: 500 - protein, 28 aa, Artificial Sequence
  Synthetic Peptide
GAKKAKKRFSFKKSFKLSGFSFKKNKKE

SEQ ID NO: 501 - protein, 27 aa, Artificial Sequence
  Synthetic Peptide
GAKKAKKRFSFKKSFKLSGFSFKKNKK

SEQ ID NO: 502 - protein, 26 aa, Artificial Sequence
  Synthetic Peptide
GAKKAKKRFSFKKSFKLSGFSFKKNK

SEQ ID NO: 503 - protein, 25 aa, Artificial Sequence
  Synthetic Peptide
GAKKAKKRFSFKKSFKLSGFSFKKN

SEQ ID NO: 504 - protein, 24 aa, Artificial Sequence
  Synthetic Peptide
GAKKAKKRFSFKKSFKLSGFSFKK

SEQ ID NO: 505 - protein, 23 aa, Artificial Sequence
  Synthetic Peptide
GAKKAKKRFSFKKSFKLSGFSFK

SEQ ID NO: 506 - protein, 22 aa, Artificial Sequence
  Synthetic Peptide
GAKKAKKRFSFKKSFKLSGFSF

SEQ ID NO: 507 - protein, 21 aa, Artificial Sequence
  Synthetic Peptide
GAKKAKKRFSFKKSFKLSGFS

SEQ ID NO: 508 - protein, 20 aa, Artificial Sequence
  Synthetic Peptide
GAKKAKKRFSFKKSFKLSGF

SEQ ID NO: 509 - protein, 19 aa, Artificial Sequence
  Synthetic Peptide
GAKKAKKRFSFKKSFKLSG

SEQ ID NO: 510 - protein, 18 aa, Artificial Sequence
  Synthetic Peptide
GAKKAKKRFSFKKSFKLS

SEQ ID NO: 511 - protein, 17 aa, Artificial Sequence
  Synthetic Peptide
GAKKAKKRFSFKKSFKL

SEQ ID NO: 512 - protein, 16 aa, Artificial Sequence
  Synthetic Peptide
GAKKAKKRFSFKKSFK

SEQ ID NO: 513 - protein, 15 aa, Artificial Sequence
  Synthetic Peptide
GAKKAKKRFSFKKSF

SEQ ID NO: 514 - protein, 14 aa, Artificial Sequence
  Synthetic Peptide
GAKKAKKRFSFKKS

SEQ ID NO: 515 - protein, 13 aa, Artificial Sequence
  Synthetic Peptide
GAKKAKKRFSFKK

SEQ ID NO: 516 - protein, 12 aa, Artificial Sequence
  Synthetic Peptide
GAKKAKKRFSFK

SEQ ID NO: 517 - protein, 11 aa, Artificial Sequence
  Synthetic Peptide
GAKKAKKRFSF

SEQ ID NO: 518 - protein, 10 aa, Artificial Sequence
  Synthetic Peptide
GAKKAKKRFS

SEQ ID NO: 519 - protein, 9 aa, Artificial Sequence
  Synthetic Peptide
GAKKAKKRF

SEQ ID NO: 520 - protein, 8 aa, Artificial Sequence
  Synthetic Peptide
GAKKAKKR

SEQ ID NO: 521 - protein, 7 aa, Artificial Sequence
  Synthetic Peptide
GAKKAKK

SEQ ID NO: 522 - protein, 28 aa, Artificial Sequence
  Synthetic Peptide
GAQESKKKKKKRFSFKKSFKLSGFSFKK

SEQ ID NO: 523 - protein, 27 aa, Artificial Sequence
  Synthetic Peptide
GAQESKKKKKKRFSFKKSFKLSGFSFK

SEQ ID NO: 524 - protein, 26 aa, Artificial Sequence
  Synthetic Peptide
GAQESKKKKKKRFSFKKSFKLSGFSF

SEQ ID NO: 525 - protein, 25 aa, Artificial Sequence
  Synthetic Peptide
GAQESKKKKKKRFSFKKSFKLSGFS

SEQ ID NO: 526 - protein, 24 aa, Artificial Sequence
  Synthetic Peptide
GAQESKKKKKKRFSFKKSFKLSGF

SEQ ID NO: 527 - protein, 23 aa, Artificial Sequence
  Synthetic Peptide
GAQESKKKKKKRFSFKKSFKLSG

SEQ ID NO: 528 - protein, 22 aa, Artificial Sequence
  Synthetic Peptide
GAQESKKKKKKRFSFKKSFKLS

SEQ ID NO: 529 - protein, 21 aa, Artificial Sequence
  Synthetic Peptide
GAQESKKKKKKRFSFKKSFKL

SEQ ID NO: 530 - protein, 20 aa, Artificial Sequence
  Synthetic Peptide
GAQESKKKKKKRFSFKKSFK

SEQ ID NO: 531 - protein, 19 aa, Artificial Sequence
  Synthetic Peptide
GAQESKKKKKKRFSFKKSF

SEQ ID NO: 532 - protein, 18 aa, Artificial Sequence
  Synthetic Peptide
GAQESKKKKKKRFSFKKS

SEQ ID NO: 533 - protein, 17 aa, Artificial Sequence
  Synthetic Peptide
GAQESKKKKKKRFSFKK

SEQ ID NO: 534 - protein, 16 aa, Artificial Sequence
  Synthetic Peptide
GAQESKKKKKKRFSFK

SEQ ID NO: 535 - protein, 15 aa, Artificial Sequence
  Synthetic Peptide
GAQESKKKKKKRFSF

SEQ ID NO: 536 - protein, 14 aa, Artificial Sequence
  Synthetic Peptide
GAQESKKKKKKRFS

SEQ ID NO: 537 - protein, 13 aa, Artificial Sequence
  Synthetic Peptide
GAQESKKKKKKRF

SEQ ID NO: 538 - protein, 12 aa, Artificial Sequence
  Synthetic Peptide
GAQESKKKKKKR

SEQ ID NO: 539 - protein, 11 aa, Artificial Sequence
  Synthetic Peptide
GAQESKKKKKK

SEQ ID NO: 540 - protein, 10 aa, Artificial Sequence
  Synthetic Peptide
GAQESKKKKK

SEQ ID NO: 541 - protein, 9 aa, Artificial Sequence
  Synthetic Peptide
GAQESKKKK

SEQ ID NO: 542 - protein, 8 aa, Artificial Sequence
  Synthetic Peptide
GAQESKKK

SEQ ID NO: 543 - protein, 7 aa, Artificial Sequence
  Synthetic Peptide
GAQESKK

SEQ ID NO: 544 - protein, 30 aa, Artificial Sequence
  Synthetic Peptide
GSQSSKKKKKKFSFKKPFKLSGLSFKRNRK

SEQ ID NO: 545 - protein, 29 aa, Artificial Sequence
  Synthetic Peptide
GSQSSKKKKKKFSFKKPFKLSGLSFKRNR

SEQ ID NO: 546 - protein, 28 aa, Artificial Sequence
  Synthetic Peptide
GSQSSKKKKKKFSFKKPFKLSGLSFKRN

SEQ ID NO: 547 - protein, 27 aa, Artificial Sequence
  Synthetic Peptide
GSQSSKKKKKKFSFKKPFKLSGLSFKR

SEQ ID NO: 548 - protein, 26 aa, Artificial Sequence
  Synthetic Peptide
GSQSSKKKKKKFSFKKPFKLSGLSFK

SEQ ID NO: 549 - protein, 25 aa, Artificial Sequence
  Synthetic Peptide
GSQSSKKKKKKFSFKKPFKLSGLSF

SEQ ID NO: 550 - protein, 24 aa, Artificial Sequence
  Synthetic Peptide
GSQSSKKKKKKFSFKKPFKLSGLS

SEQ ID NO: 551 - protein, 23 aa, Artificial Sequence
  Synthetic Peptide
GSQSSKKKKKKFSFKKPFKLSGL

SEQ ID NO: 552 - protein, 22 aa, Artificial Sequence
  Synthetic Peptide
GSQSSKKKKKKFSFKKPFKLSG

SEQ ID NO: 553 - protein, 21 aa, Artificial Sequence
  Synthetic Peptide
GSQSSKKKKKKFSFKKPFKLS

SEQ ID NO: 554 - protein, 20 aa, Artificial Sequence
  Synthetic Peptide
GSQSSKKKKKKFSFKKPFKL

SEQ ID NO: 555 - protein, 19 aa, Artificial Sequence
  Synthetic Peptide
GSQSSKKKKKKFSFKKPFK

SEQ ID NO: 556 - protein, 18 aa, Artificial Sequence
  Synthetic Peptide
GSQSSKKKKKKFSFKKPF

SEQ ID NO: 557 - protein, 17 aa, Artificial Sequence
  Synthetic Peptide
GSQSSKKKKKKFSFKKP

SEQ ID NO: 558 - protein, 16 aa, Artificial Sequence
  Synthetic Peptide
GSQSSKKKKKKFSFKK

SEQ ID NO: 559 - protein, 15 aa, Artificial Sequence
  Synthetic Peptide
GSQSSKKKKKKFSFK

SEQ ID NO: 560 - protein, 14 aa, Artificial Sequence
  Synthetic Peptide
GSQSSKKKKKKFSF

SEQ ID NO: 561 - protein, 13 aa, Artificial Sequence
  Synthetic Peptide
GSQSSKKKKKKFS

SEQ ID NO: 562 - protein, 12 aa, Artificial Sequence
  Synthetic Peptide
GSQSSKKKKKKF

SEQ ID NO: 563 - protein, 11 aa, Artificial Sequence
  Synthetic Peptide
GSQSSKKKKKK

SEQ ID NO: 564 - protein, 10 aa, Artificial Sequence
  Synthetic Peptide
GSQSSKKKKK

SEQ ID NO: 565 - protein, 9 aa, Artificial Sequence
  Synthetic Peptide
GSQSSKKKK

SEQ ID NO: 566 - protein, 8 aa, Artificial Sequence
  Synthetic Peptide
GSQSSKKK

SEQ ID NO: 567 - protein, 7 aa, Artificial Sequence
  Synthetic Peptide
GSQSSKK

SEQ ID NO: 568-597 - skipped (30 entries)

SEQ ID NO: 598 - protein, 4 aa, Artificial Sequence
  GGGG motif
GGGG

SEQ ID NO: 599 - protein, 25 aa, Artificial Sequence
  KRAS Variant
QYRLKKISKEEKTPGCVKIKKCIIM

SEQ ID NO: 600 - protein, 24 aa, Artificial Sequence
  KRAS Variant
KHKEKMSKDGKKKKKKSKTKCVIM

SEQ ID NO: 601 - DNA, 15 bp, Artificial Sequence
  Antisense Oligonucleotide
ctggtgacgagggtt

SEQ ID NO: 602 - DNA, 15 bp, Artificial Sequence
  Antisense Oligonucleotide
cgctcacaccgcttg

SEQ ID NO: 603 - DNA, 15 bp, Artificial Sequence
  Antisense Oligonucleotide
aggctagtaacgtac

SEQ ID NO: 604 - DNA, 15 bp, Artificial Sequence
  Antisense Oligonucleotide
gaaggctagtaacgt

SEQ ID NO: 605 - DNA, 15 bp, Artificial Sequence
  Antisense Oligonucleotide
ggttccgtcgggctc

SEQ ID NO: 606 - DNA, 15 bp, Artificial Sequence
  Antisense Oligonucleotide
aggttccgtcgggct

SEQ ID NO: 607 - DNA, 15 bp, Artificial Sequence
  Antisense Oligonucleotide
aaggttccgtcgggc

SEQ ID NO: 608 - DNA, 15 bp, Artificial Sequence
  Antisense Oligonucleotide
aaaggttccgtcggg

SEQ ID NO: 609 - DNA, 15 bp, Artificial Sequence
  Antisense Oligonucleotide
gaaaggttccgtcgg

SEQ ID NO: 610 - DNA, 15 bp, Artificial Sequence
  Antisense Oligonucleotide
agaaaggttccgtcg

SEQ ID NO: 611 - DNA, 15 bp, Artificial Sequence
  Antisense Oligonucleotide
agtcgctgaagcgga

SEQ ID NO: 612 - DNA, 15 bp, Artificial Sequence
  Antisense Oligonucleotide
gagtcgctgaagcgg

SEQ ID NO: 613 - DNA, 15 bp, Artificial Sequence
  Antisense Oligonucleotide
cggattcggtccccc

SEQ ID NO: 614 - DNA, 15 bp, Artificial Sequence
  Antisense Oligonucleotide
ccggattcggtcccc

SEQ ID NO: 615 - DNA, 15 bp, Artificial Sequence
  Antisense Oligonucleotide
cccggattcggtccc

SEQ ID NO: 616 - DNA, 15 bp, Artificial Sequence
  Antisense Oligonucleotide
tcccggattcggtcc

SEQ ID NO: 617 - DNA, 15 bp, Artificial Sequence
  Antisense Oligonucleotide
gatcccggattcggt

SEQ ID NO: 618 - DNA, 15 bp, Artificial Sequence
  Antisense Oligonucleotide
agatcccggattcgg

SEQ ID NO: 619 - DNA, 15 bp, Artificial Sequence
  Antisense Oligonucleotide
aagatcccggattcg

SEQ ID NO: 620 - DNA, 15 bp, Artificial Sequence
  Antisense Oligonucleotide
tgatacggggggatg

SEQ ID NO: 621 - DNA, 15 bp, Artificial Sequence
  Antisense Oligonucleotide
cgtgtgcgcgctgca

SEQ ID NO: 622 - DNA, 16 bp, Artificial Sequence
  Antisense Oligonucleotide
actggtgacgagggtt

SEQ ID NO: 623 - DNA, 16 bp, Artificial Sequence
  Antisense Oligonucleotide
aactggtgacgagggt

SEQ ID NO: 624 - DNA, 16 bp, Artificial Sequence
  Antisense Oligonucleotide
ctcacaccgcttgatc

SEQ ID NO: 625 - DNA, 16 bp, Artificial Sequence
  Antisense Oligonucleotide
cggtcagaccagtagc

SEQ ID NO: 626 - DNA, 16 bp, Artificial Sequence
  Antisense Oligonucleotide
ctagtaacgtactgtt

SEQ ID NO: 627 - DNA, 16 bp, Artificial Sequence
  Antisense Oligonucleotide
gctagtaacgtactgt

SEQ ID NO: 628 - DNA, 16 bp, Artificial Sequence
  Antisense Oligonucleotide
ggctagtaacgtactg

SEQ ID NO: 629 - DNA, 16 bp, Artificial Sequence
  Antisense Oligonucleotide
aggctagtaacgtact

SEQ ID NO: 630 - DNA, 16 bp, Artificial Sequence
  Antisense Oligonucleotide
aaggctagtaacgtac

SEQ ID NO: 631 - DNA, 16 bp, Artificial Sequence
  Antisense Oligonucleotide
aagaaggctagtaacg

SEQ ID NO: 632 - DNA, 16 bp, Artificial Sequence
  Antisense Oligonucleotide
aaaggttccgtcgggc

SEQ ID NO: 633 - DNA, 16 bp, Artificial Sequence
  Antisense Oligonucleotide
agaaaggttccgtcgg

SEQ ID NO: 634 - DNA, 16 bp, Artificial Sequence
  Antisense Oligonucleotide
ttcggtcccccagtga

SEQ ID NO: 635 - DNA, 16 bp, Artificial Sequence
  Antisense Oligonucleotide
cggattcggtccccca

SEQ ID NO: 636 - DNA, 16 bp, Artificial Sequence
  Antisense Oligonucleotide
agatcccggattcggt

SEQ ID NO: 637 - DNA, 16 bp, Artificial Sequence
  Antisense Oligonucleotide
agcaagatcccggatt

SEQ ID NO: 638 - DNA, 16 bp, Artificial Sequence
  Antisense Oligonucleotide
tgatacggggggatgg

SEQ ID NO: 639 - DNA, 16 bp, Artificial Sequence
  Antisense Oligonucleotide
ttgatacggggggatg

SEQ ID NO: 640 - DNA, 16 bp, Artificial Sequence
  Antisense Oligonucleotide
agaggccttgatacgg

SEQ ID NO: 641 - DNA, 16 bp, Artificial Sequence
  Antisense Oligonucleotide
gggttagcatatgtca

SEQ ID NO: 642 - DNA, 17 bp, Artificial Sequence
  Antisense Oligonucleotide
tggatctcccctactcg

SEQ ID NO: 643 - DNA, 17 bp, Artificial Sequence
  Antisense Oligonucleotide
actggtgacgagggttc

SEQ ID NO: 644 - DNA, 17 bp, Artificial Sequence
  Antisense Oligonucleotide
gctcacaccgcttgatc

SEQ ID NO: 645 - DNA, 17 bp, Artificial Sequence
  Antisense Oligonucleotide
cgctcacaccgcttgat

SEQ ID NO: 646 - DNA, 17 bp, Artificial Sequence
  Antisense Oligonucleotide
tccgctcacaccgcttg

SEQ ID NO: 647 - DNA, 17 bp, Artificial Sequence
  Antisense Oligonucleotide
ttccgctcacaccgctt

SEQ ID NO: 648 - DNA, 17 bp, Artificial Sequence
  Antisense Oligonucleotide
accagtagctccggaga

SEQ ID NO: 649 - DNA, 17 bp, Artificial Sequence
  Antisense Oligonucleotide
gccggtcagaccagtag

SEQ ID NO: 650 - DNA, 17 bp, Artificial Sequence
  Antisense Oligonucleotide
agccggtcagaccagta

SEQ ID NO: 651 - DNA, 17 bp, Artificial Sequence
  Antisense Oligonucleotide
agaaggctagtaacgta

SEQ ID NO: 652 - DNA, 17 bp, Artificial Sequence
  Antisense Oligonucleotide
aaggttccgtcgggctc

SEQ ID NO: 653 - DNA, 17 bp, Artificial Sequence
  Antisense Oligonucleotide
aaaggttccgtcgggct

SEQ ID NO: 654 - DNA, 17 bp, Artificial Sequence
  Antisense Oligonucleotide
gaaaggttccgtcgggc

SEQ ID NO: 655 - DNA, 17 bp, Artificial Sequence
  Antisense Oligonucleotide
ctgagtcgctgaagcgg

SEQ ID NO: 656 - DNA, 17 bp, Artificial Sequence
  Antisense Oligonucleotide
tctgagtcgctgaagcg

SEQ ID NO: 657 - DNA, 17 bp, Artificial Sequence
  Antisense Oligonucleotide
atcccggattcggtccc

SEQ ID NO: 658 - DNA, 17 bp, Artificial Sequence
  Antisense Oligonucleotide
gatcccggattcggtcc

SEQ ID NO: 659 - DNA, 17 bp, Artificial Sequence
  Antisense Oligonucleotide
agatcccggattcggtc

SEQ ID NO: 660 - DNA, 17 bp, Artificial Sequence
  Antisense Oligonucleotide
aagatcccggattcggt

SEQ ID NO: 661 - DNA, 17 bp, Artificial Sequence
  Antisense Oligonucleotide
gcaagatcccggattcg

SEQ ID NO: 662 - DNA, 17 bp, Artificial Sequence
  Antisense Oligonucleotide
cggtcatcttgatggta

SEQ ID NO: 663 - DNA, 17 bp, Artificial Sequence
  Antisense Oligonucleotide
tgatacggggggatgga

SEQ ID NO: 664 - DNA, 17 bp, Artificial Sequence
  Antisense Oligonucleotide
ttgatacggggggatgg

SEQ ID NO: 665 - DNA, 17 bp, Artificial Sequence
  Antisense Oligonucleotide
cttgatacggggggatg

SEQ ID NO: 666 - DNA, 17 bp, Artificial Sequence
  Antisense Oligonucleotide
gaggccttgatacgggg

SEQ ID NO: 667 - DNA, 20 bp, Artificial Sequence
  Antisense Oligonucleotide
gggggtccctctgatatatg

SEQ ID NO: 668 - DNA, 20 bp, Artificial Sequence
  Antisense Oligonucleotide
gtggatctcccctactcggt

SEQ ID NO: 669 - DNA, 20 bp, Artificial Sequence
  Antisense Oligonucleotide
agcccaacaggaatcgaact

SEQ ID NO: 670 - DNA, 20 bp, Artificial Sequence
  Antisense Oligonucleotide
cgctcacaccgcttgatctt

SEQ ID NO: 671 - DNA, 20 bp, Artificial Sequence
  Antisense Oligonucleotide
ccgctcacaccgcttgatct

SEQ ID NO: 672 - DNA, 20 bp, Artificial Sequence
  Antisense Oligonucleotide
tccgctcacaccgcttgatc

SEQ ID NO: 673 - DNA, 20 bp, Artificial Sequence
  Antisense Oligonucleotide
agtttgccggggccaagtgt

SEQ ID NO: 674 - DNA, 20 bp, Artificial Sequence
  Antisense Oligonucleotide
aagggcacgcggtccatctc

SEQ ID NO: 675 - DNA, 20 bp, Artificial Sequence
  Antisense Oligonucleotide
aaagggcacgcggtccatct

SEQ ID NO: 676 - DNA, 20 bp, Artificial Sequence
  Antisense Oligonucleotide
caaagggcacgcggtccatc

SEQ ID NO: 677 - DNA, 20 bp, Artificial Sequence
  Antisense Oligonucleotide
acaaagggcacgcggtccat

SEQ ID NO: 678 - DNA, 20 bp, Artificial Sequence
  Antisense Oligonucleotide
ccggagacagcgtttggtga

SEQ ID NO: 679 - DNA, 20 bp, Artificial Sequence
  Antisense Oligonucleotide
tccggagacagcgtttggtg

SEQ ID NO: 680 - DNA, 20 bp, Artificial Sequence
  Antisense Oligonucleotide
agtagctccggagacagcgt

SEQ ID NO: 681 - DNA, 20 bp, Artificial Sequence
  Antisense Oligonucleotide
cggtcagaccagtagctccg

SEQ ID NO: 682 - DNA, 20 bp, Artificial Sequence
  Antisense Oligonucleotide
agccggtcagaccagtagct

SEQ ID NO: 683 - DNA, 20 bp, Artificial Sequence
  Antisense Oligonucleotide
cagccggtcagaccagtagc

SEQ ID NO: 684 - DNA, 20 bp, Artificial Sequence
  Antisense Oligonucleotide
gctagtaacgtactgtttgc

SEQ ID NO: 685 - DNA, 20 bp, Artificial Sequence
  Antisense Oligonucleotide
aagaaggctagtaacgtact

SEQ ID NO: 686 - DNA, 20 bp, Artificial Sequence
  Antisense Oligonucleotide
gaagaaggctagtaacgtac

SEQ ID NO: 687 - DNA, 20 bp, Artificial Sequence
  Antisense Oligonucleotide
agaagaaggctagtaacgta

SEQ ID NO: 688 - DNA, 20 bp, Artificial Sequence
  Antisense Oligonucleotide
gagaaaggttccgtcgggct

SEQ ID NO: 689 - DNA, 20 bp, Artificial Sequence
  Antisense Oligonucleotide
ggagaaaggttccgtcgggc

SEQ ID NO: 690 - DNA, 20 bp, Artificial Sequence
  Antisense Oligonucleotide
cggattcggtcccccagtga

SEQ ID NO: 691 - DNA, 20 bp, Artificial Sequence
  Antisense Oligonucleotide
ccggattcggtcccccagtg

SEQ ID NO: 692 - DNA, 20 bp, Artificial Sequence
  Antisense Oligonucleotide
atcccggattcggtccccca

SEQ ID NO: 693 - DNA, 20 bp, Artificial Sequence
  Antisense Oligonucleotide
agatcccggattcggtcccc

SEQ ID NO: 694 - DNA, 20 bp, Artificial Sequence
  Antisense Oligonucleotide
aagatcccggattcggtccc

SEQ ID NO: 695 - DNA, 20 bp, Artificial Sequence
  Antisense Oligonucleotide
gcaagatcccggattcggtc

SEQ ID NO: 696 - DNA, 20 bp, Artificial Sequence
  Antisense Oligonucleotide
tgagcaagatcccggattcg

SEQ ID NO: 697 - DNA, 20 bp, Artificial Sequence
  Antisense Oligonucleotide
tgatacggggggatggagtg

SEQ ID NO: 698 - DNA, 20 bp, Artificial Sequence
  Antisense Oligonucleotide
ttgatacggggggatggagt

SEQ ID NO: 699 - DNA, 20 bp, Artificial Sequence
  Antisense Oligonucleotide
gggagaggccttgatacggg

SEQ ID NO: 700 - DNA, 20 bp, Artificial Sequence
  Antisense Oligonucleotide
gatcaccaactggggttggc

SEQ ID NO: 701 - DNA, 20 bp, Artificial Sequence
  Antisense Oligonucleotide
tgcgtgtgcgcgctgcaggt

SEQ ID NO: 702 - DNA, 20 bp, Artificial Sequence
  Antisense Oligonucleotide
gtgcgtgtgcgcgctgcagg

SEQ ID NO: 703 - DNA, 20 bp, Artificial Sequence
  Antisense Oligonucleotide
gcccttgtacttttgcatag

SEQ ID NO: 704 - DNA, 15 bp, Artificial Sequence
  Antisense Oligonucleotide
agtccgcctcgtagt

SEQ ID NO: 705 - DNA, 15 bp, Artificial Sequence
  Antisense Oligonucleotide
ttgccgccgtacgca

SEQ ID NO: 706 - DNA, 15 bp, Artificial Sequence
  Antisense Oligonucleotide
cgccttgccgccgta

SEQ ID NO: 707 - DNA, 15 bp, Artificial Sequence
  Antisense Oligonucleotide
gctcgtggtcgccga

SEQ ID NO: 708 - DNA, 15 bp, Artificial Sequence
  Antisense Oligonucleotide
cgtagtcgtcggaga

SEQ ID NO: 709 - DNA, 15 bp, Artificial Sequence
  Antisense Oligonucleotide
ccgtagtcgtcggag

SEQ ID NO: 710 - DNA, 15 bp, Artificial Sequence
  Antisense Oligonucleotide
cccgtagtcgtcgga

SEQ ID NO: 711 - DNA, 15 bp, Artificial Sequence
  Antisense Oligonucleotide
ccccgtagtcgtcgg

SEQ ID NO: 712 - DNA, 15 bp, Artificial Sequence
  Antisense Oligonucleotide
cccccgtagtcgtcg

SEQ ID NO: 713 - DNA, 15 bp, Artificial Sequence
  Antisense Oligonucleotide
gccgtactcggccgg

SEQ ID NO: 714 - DNA, 15 bp, Artificial Sequence
  Antisense Oligonucleotide
tagccgtactcggcc

SEQ ID NO: 715 - DNA, 15 bp, Artificial Sequence
  Antisense Oligonucleotide
acgtagccgtactcg

SEQ ID NO: 716 - DNA, 15 bp, Artificial Sequence
  Antisense Oligonucleotide
tcacgtagccgtact

SEQ ID NO: 717 - DNA, 15 bp, Artificial Sequence
  Antisense Oligonucleotide
agtccgcgggctcga

SEQ ID NO: 718 - DNA, 15 bp, Artificial Sequence
  Antisense Oligonucleotide
gcgcgtacgggaagc

SEQ ID NO: 719 - DNA, 15 bp, Artificial Sequence
  Antisense Oligonucleotide
agcgcgcagcgcgta

SEQ ID NO: 720 - DNA, 15 bp, Artificial Sequence
  Antisense Oligonucleotide
aagcgcgcagcgcgt

SEQ ID NO: 721 - DNA, 15 bp, Artificial Sequence
  Antisense Oligonucleotide
taagcgcgcagcgcg

SEQ ID NO: 722 - DNA, 15 bp, Artificial Sequence
  Antisense Oligonucleotide
cgaggtaagcgcgca

SEQ ID NO: 723 - DNA, 15 bp, Artificial Sequence
  Antisense Oligonucleotide
cgccggatcttgtac

SEQ ID NO: 724 - DNA, 15 bp, Artificial Sequence
  Antisense Oligonucleotide
tcgcgccggatcttg

SEQ ID NO: 725 - DNA, 15 bp, Artificial Sequence
  Antisense Oligonucleotide
ctcgcgccggatctt

SEQ ID NO: 726 - DNA, 15 bp, Artificial Sequence
  Antisense Oligonucleotide
tcgcgcgacagctgc

SEQ ID NO: 727 - DNA, 15 bp, Artificial Sequence
  Antisense Oligonucleotide
gctcgcgcgacagct

SEQ ID NO: 728 - DNA, 16 bp, Artificial Sequence
  Antisense Oligonucleotide
agtccgcctcgtagta

SEQ ID NO: 729 - DNA, 16 bp, Artificial Sequence
  Antisense Oligonucleotide
cagtccgcctcgtagt

SEQ ID NO: 730 - DNA, 16 bp, Artificial Sequence
  Antisense Oligonucleotide
tgccgccgtacgcagc

SEQ ID NO: 731 - DNA, 16 bp, Artificial Sequence
  Antisense Oligonucleotide
ttgccgccgtacgcag

SEQ ID NO: 732 - DNA, 16 bp, Artificial Sequence
  Antisense Oligonucleotide
cttgccgccgtacgca

SEQ ID NO: 733 - DNA, 16 bp, Artificial Sequence
  Antisense Oligonucleotide
cgccttgccgccgtac

SEQ ID NO: 734 - DNA, 16 bp, Artificial Sequence
  Antisense Oligonucleotide
cgtggtcgccgatgct

SEQ ID NO: 735 - DNA, 16 bp, Artificial Sequence
  Antisense Oligonucleotide
tcgtggtcgccgatgc

SEQ ID NO: 736 - DNA, 16 bp, Artificial Sequence
  Antisense Oligonucleotide
cgctcgtggtcgccga

SEQ ID NO: 737 - DNA, 16 bp, Artificial Sequence
  Antisense Oligonucleotide
cccccgtagtcgtcgg

SEQ ID NO: 738 - DNA, 16 bp, Artificial Sequence
  Antisense Oligonucleotide
acgtagccgtactcgg

SEQ ID NO: 739 - DNA, 16 bp, Artificial Sequence
  Antisense Oligonucleotide
ggctcacgtagccgta

SEQ ID NO: 740 - DNA, 16 bp, Artificial Sequence
  Antisense Oligonucleotide
agtccgcgggctcgaa

SEQ ID NO: 741 - DNA, 16 bp, Artificial Sequence
  Antisense Oligonucleotide
cagtccgcgggctcga

SEQ ID NO: 742 - DNA, 16 bp, Artificial Sequence
  Antisense Oligonucleotide
ttccgcttgcagtccg

SEQ ID NO: 743 - DNA, 16 bp, Artificial Sequence
  Antisense Oligonucleotide
acgggaagcccgccgc

SEQ ID NO: 744 - DNA, 16 bp, Artificial Sequence
  Antisense Oligonucleotide
tacgggaagcccgccg

SEQ ID NO: 745 - DNA, 16 bp, Artificial Sequence
  Antisense Oligonucleotide
aagcgcgcagcgcgta

SEQ ID NO: 746 - DNA, 16 bp, Artificial Sequence
  Antisense Oligonucleotide
taagcgcgcagcgcgt

SEQ ID NO: 747 - DNA, 16 bp, Artificial Sequence
  Antisense Oligonucleotide
gtaagcgcgcagcgcg

SEQ ID NO: 748 - DNA, 16 bp, Artificial Sequence
  Antisense Oligonucleotide
accgcctggtagccga

SEQ ID NO: 749 - DNA, 16 bp, Artificial Sequence
  Antisense Oligonucleotide
tcggcaccgcctggta

SEQ ID NO: 750 - DNA, 16 bp, Artificial Sequence
  Antisense Oligonucleotide
cgtcgctgtgcttgtc

SEQ ID NO: 751 - DNA, 16 bp, Artificial Sequence
  Antisense Oligonucleotide
cgccggatcttgtact

SEQ ID NO: 752 - DNA, 16 bp, Artificial Sequence
  Antisense Oligonucleotide
tcgcgccggatcttgt

SEQ ID NO: 753 - DNA, 16 bp, Artificial Sequence
  Antisense Oligonucleotide
gctcgcgccggatctt

SEQ ID NO: 754 - DNA, 17 bp, Artificial Sequence
  Antisense Oligonucleotide
cagtccgcctcgtagta

SEQ ID NO: 755 - DNA, 17 bp, Artificial Sequence
  Antisense Oligonucleotide
cttgccgccgtacgcag

SEQ ID NO: 756 - DNA, 17 bp, Artificial Sequence
  Antisense Oligonucleotide
ccttgccgccgtacgca

SEQ ID NO: 757 - DNA, 17 bp, Artificial Sequence
  Antisense Oligonucleotide
cgccttgccgccgtacg

SEQ ID NO: 758 - DNA, 17 bp, Artificial Sequence
  Antisense Oligonucleotide
cgctcgtggtcgccgat

SEQ ID NO: 759 - DNA, 17 bp, Artificial Sequence
  Antisense Oligonucleotide
gcgctcgtggtcgccga

SEQ ID NO: 760 - DNA, 17 bp, Artificial Sequence
  Antisense Oligonucleotide
ccgtagtcgtcggagaa

SEQ ID NO: 761 - DNA, 17 bp, Artificial Sequence
  Antisense Oligonucleotide
cccccgtagtcgtcgga

SEQ ID NO: 762 - DNA, 17 bp, Artificial Sequence
  Antisense Oligonucleotide
tgcccccgtagtcgtcg

SEQ ID NO: 763 - DNA, 17 bp, Artificial Sequence
  Antisense Oligonucleotide
acgtagccgtactcggc

SEQ ID NO: 764 - DNA, 17 bp, Artificial Sequence
  Antisense Oligonucleotide
cacgtagccgtactcgg

SEQ ID NO: 765 - DNA, 17 bp, Artificial Sequence
  Antisense Oligonucleotide
ggctcacgtagccgtac

SEQ ID NO: 766 - DNA, 17 bp, Artificial Sequence
  Antisense Oligonucleotide
gtacgggaagcccgccg

SEQ ID NO: 767 - DNA, 17 bp, Artificial Sequence
  Antisense Oligonucleotide
cgcgtacgggaagcccg

SEQ ID NO: 768 - DNA, 17 bp, Artificial Sequence
  Antisense Oligonucleotide
agcgcgcagcgcgtacg

SEQ ID NO: 769 - DNA, 17 bp, Artificial Sequence
  Antisense Oligonucleotide
aagcgcgcagcgcgtac

SEQ ID NO: 770 - DNA, 17 bp, Artificial Sequence
  Antisense Oligonucleotide
taagcgcgcagcgcgta

SEQ ID NO: 771 - DNA, 17 bp, Artificial Sequence
  Antisense Oligonucleotide
gtaagcgcgcagcgcgt

SEQ ID NO: 772 - DNA, 17 bp, Artificial Sequence
  Antisense Oligonucleotide
cggatcttgtactcgtc

SEQ ID NO: 773 - DNA, 17 bp, Artificial Sequence
  Antisense Oligonucleotide
cgcgccggatcttgtac

SEQ ID NO: 774 - DNA, 17 bp, Artificial Sequence
  Antisense Oligonucleotide
tcgcgccggatcttgta

SEQ ID NO: 775 - DNA, 17 bp, Artificial Sequence
  Antisense Oligonucleotide
ctcgcgccggatcttgt

SEQ ID NO: 776 - DNA, 17 bp, Artificial Sequence
  Antisense Oligonucleotide
cgctcgcgccggatctt

SEQ ID NO: 777 - DNA, 17 bp, Artificial Sequence
  Antisense Oligonucleotide
ttgcgctcgcgccggat

SEQ ID NO: 778 - DNA, 20 bp, Artificial Sequence
  Antisense Oligonucleotide
cgccttgccgccgtacgcag

SEQ ID NO: 779 - DNA, 20 bp, Artificial Sequence
  Antisense Oligonucleotide
ccgccttgccgccgtacgca

SEQ ID NO: 780 - DNA, 20 bp, Artificial Sequence
  Antisense Oligonucleotide
ttgcccccgtagtcgtcgga

SEQ ID NO: 781 - DNA, 20 bp, Artificial Sequence
  Antisense Oligonucleotide
taagcgcgcagcgcgtacgg

SEQ ID NO: 782 - DNA, 20 bp, Artificial Sequence
  Antisense Oligonucleotide
gtaagcgcgcagcgcgtacg

SEQ ID NO: 783 - DNA, 20 bp, Artificial Sequence
  Antisense Oligonucleotide
aggtaagcgcgcagcgcgta

SEQ ID NO: 784 - DNA, 20 bp, Artificial Sequence
  Antisense Oligonucleotide
cgcgccggatcttgtactcg

SEQ ID NO: 785 - DNA, 20 bp, Artificial Sequence
  Antisense Oligonucleotide
gcgctcgcgccggatcttgt

SEQ ID NO: 786 - DNA, 20 bp, Artificial Sequence
  Antisense Oligonucleotide
gcgctcgtggtcgccgatgc

SEQ ID NO: 787 - DNA, 20 bp, Artificial Sequence
  Antisense Oligonucleotide
tagccgtactcggccggctt

SEQ ID NO: 788 - DNA, 20 bp, Artificial Sequence
  Antisense Oligonucleotide
gtagccgtactcggccggct

SEQ ID NO: 789 - DNA, 20 bp, Artificial Sequence
  Antisense Oligonucleotide
cgtagccgtactcggccggc

SEQ ID NO: 790 - DNA, 20 bp, Artificial Sequence
  Antisense Oligonucleotide
ggtaagcgcgcagcgcgtac

SEQ ID NO: 791 - DNA, 20 bp, Artificial Sequence
  Antisense Oligonucleotide
tagccgaggtaagcgcgcag

SEQ ID NO: 792 - DNA, 20 bp, Artificial Sequence
  Antisense Oligonucleotide
gtagccgaggtaagcgcgca

SEQ ID NO: 793 - DNA, 20 bp, Artificial Sequence
  Antisense Oligonucleotide
cggatcttgtactcgtcgct

SEQ ID NO: 794 - DNA, 20 bp, Artificial Sequence
  Antisense Oligonucleotide
ttgcgctcgcgccggatctt

SEQ ID NO: 795 - DNA, 20 bp, Artificial Sequence
  Antisense Oligonucleotide
gttgcgctcgcgccggatct

SEQ ID NO: 796 - DNA, 20 bp, Artificial Sequence
  Antisense Oligonucleotide
cgctcgtggtcgccgatgct

SEQ ID NO: 797 - DNA, 20 bp, Artificial Sequence
  Antisense Oligonucleotide
gcgcgctcgtggtcgccgat

SEQ ID NO: 798 - DNA, 20 bp, Artificial Sequence
  Antisense Oligonucleotide
acgtagccgtactcggccgg

SEQ ID NO: 799 - DNA, 20 bp, Artificial Sequence
  Antisense Oligonucleotide
gcgccggatcttgtactcgt

SEQ ID NO: 800 - DNA, 20 bp, Artificial Sequence
  Antisense Oligonucleotide
tcgcgccggatcttgtactc

SEQ ID NO: 801 - DNA, 20 bp, Artificial Sequence
  Antisense Oligonucleotide
gctcgcgccggatcttgtac

SEQ ID NO: 802 - DNA, 20 bp, Artificial Sequence
  Antisense Oligonucleotide
cgcgctcgtggtcgccgatg

SEQ ID NO: 803 - DNA, 20 bp, Artificial Sequence
  Antisense Oligonucleotide
aagcgcgcagcgcgtacggg

SEQ ID NO: 804 - DNA, 20 bp, Artificial Sequence
  Antisense Oligonucleotide
ccggatcttgtactcgtcgc

SEQ ID NO: 805 - DNA, 20 bp, Artificial Sequence
  Antisense Oligonucleotide
ctcgcgccggatcttgtact

SEQ ID NO: 806 - DNA, 20 bp, Artificial Sequence
  Antisense Oligonucleotide
cgctcgcgccggatcttgta

SEQ ID NO: 807 - DNA, 14 bp, Artificial Sequence
  Antisense Oligonucleotide
tcagctccaactac

SEQ ID NO: 808 - DNA, 14 bp, Artificial Sequence
  Antisense Oligonucleotide
atcagctccaacta

SEQ ID NO: 809 - DNA, 14 bp, Artificial Sequence
  Antisense Oligonucleotide
catcagctccaact

SEQ ID NO: 810 - DNA, 14 bp, Artificial Sequence
  Antisense Oligonucleotide
ccatcagctccaac

SEQ ID NO: 811 - DNA, 14 bp, Artificial Sequence
  Antisense Oligonucleotide
gccatcagctccaa

SEQ ID NO: 812 - DNA, 14 bp, Artificial Sequence
  Antisense Oligonucleotide
cgccatcagctcca

SEQ ID NO: 813 - DNA, 14 bp, Artificial Sequence
  Antisense Oligonucleotide
acgccatcagctcc

SEQ ID NO: 814 - DNA, 14 bp, Artificial Sequence
  Antisense Oligonucleotide
tacgccatcagctc

SEQ ID NO: 815 - DNA, 14 bp, Artificial Sequence
  Antisense Oligonucleotide
ctacgccatcagct

SEQ ID NO: 816 - DNA, 14 bp, Artificial Sequence
  Antisense Oligonucleotide
cctacgccatcagc

SEQ ID NO: 817 - DNA, 14 bp, Artificial Sequence
  Antisense Oligonucleotide
gcctacgccatcag

SEQ ID NO: 818 - DNA, 14 bp, Artificial Sequence
  Antisense Oligonucleotide
tgcctacgccatca

SEQ ID NO: 819 - DNA, 14 bp, Artificial Sequence
  Antisense Oligonucleotide
ttgcctacgccatc

SEQ ID NO: 820 - DNA, 14 bp, Artificial Sequence
  Antisense Oligonucleotide
cttgcctacgccat

SEQ ID NO: 821 - DNA, 15 bp, Artificial Sequence
  Antisense Oligonucleotide
tcagctccaactacc

SEQ ID NO: 822 - DNA, 15 bp, Artificial Sequence
  Antisense Oligonucleotide
atcagctccaactac

SEQ ID NO: 823 - DNA, 15 bp, Artificial Sequence
  Antisense Oligonucleotide
catcagctccaacta

SEQ ID NO: 824 - DNA, 15 bp, Artificial Sequence
  Antisense Oligonucleotide
ccatcagctccaact

SEQ ID NO: 825 - DNA, 15 bp, Artificial Sequence
  Antisense Oligonucleotide
gccatcagctccaac

SEQ ID NO: 826 - DNA, 15 bp, Artificial Sequence
  Antisense Oligonucleotide
cgccatcagctccaa

SEQ ID NO: 827 - DNA, 15 bp, Artificial Sequence
  Antisense Oligonucleotide
acgccatcagctcca

SEQ ID NO: 828 - DNA, 15 bp, Artificial Sequence
  Antisense Oligonucleotide
tacgccatcagctcc

SEQ ID NO: 829 - DNA, 15 bp, Artificial Sequence
  Antisense Oligonucleotide
ctacgccatcagctc

SEQ ID NO: 830 - DNA, 15 bp, Artificial Sequence
  Antisense Oligonucleotide
cctacgccatcagct

SEQ ID NO: 831 - DNA, 15 bp, Artificial Sequence
  Antisense Oligonucleotide
gcctacgccatcagc

SEQ ID NO: 832 - DNA, 15 bp, Artificial Sequence
  Antisense Oligonucleotide
tgcctacgccatcag

SEQ ID NO: 833 - DNA, 15 bp, Artificial Sequence
  Antisense Oligonucleotide
ttgcctacgccatca

SEQ ID NO: 834 - DNA, 15 bp, Artificial Sequence
  Antisense Oligonucleotide
cttgcctacgccatc

SEQ ID NO: 835 - DNA, 15 bp, Artificial Sequence
  Antisense Oligonucleotide
tcttgcctacgccat

SEQ ID NO: 836 - DNA, 16 bp, Artificial Sequence
  Antisense Oligonucleotide
tcagctccaactacca

SEQ ID NO: 837 - DNA, 16 bp, Artificial Sequence
  Antisense Oligonucleotide
atcagctccaactacc

SEQ ID NO: 838 - DNA, 16 bp, Artificial Sequence
  Antisense Oligonucleotide
catcagctccaactac

SEQ ID NO: 839 - DNA, 16 bp, Artificial Sequence
  Antisense Oligonucleotide
ccatcagctccaacta

SEQ ID NO: 840 - DNA, 16 bp, Artificial Sequence
  Antisense Oligonucleotide
gccatcagctccaact

SEQ ID NO: 841 - DNA, 16 bp, Artificial Sequence
  Antisense Oligonucleotide
cgccatcagctccaac

SEQ ID NO: 842 - DNA, 16 bp, Artificial Sequence
  Antisense Oligonucleotide
acgccatcagctccaa

SEQ ID NO: 843 - DNA, 16 bp, Artificial Sequence
  Antisense Oligonucleotide
tacgccatcagctcca

SEQ ID NO: 844 - DNA, 16 bp, Artificial Sequence
  Antisense Oligonucleotide
ctacgccatcagctcc

SEQ ID NO: 845 - DNA, 16 bp, Artificial Sequence
  Antisense Oligonucleotide
cctacgccatcagctc

SEQ ID NO: 846 - DNA, 16 bp, Artificial Sequence
  Antisense Oligonucleotide
gcctacgccatcagct

SEQ ID NO: 847 - DNA, 16 bp, Artificial Sequence
  Antisense Oligonucleotide
tgcctacgccatcagc

SEQ ID NO: 848 - DNA, 16 bp, Artificial Sequence
  Antisense Oligonucleotide
ttgcctacgccatcag

SEQ ID NO: 849 - DNA, 16 bp, Artificial Sequence
  Antisense Oligonucleotide
cttgcctacgccatca

SEQ ID NO: 850 - DNA, 16 bp, Artificial Sequence
  Antisense Oligonucleotide
tcttgcctacgccatc

SEQ ID NO: 851 - DNA, 16 bp, Artificial Sequence
  Antisense Oligonucleotide
ctcttgcctacgccat

SEQ ID NO: 852 - DNA, 17 bp, Artificial Sequence
  Antisense Oligonucleotide
tcagctccaactaccac

SEQ ID NO: 853 - DNA, 17 bp, Artificial Sequence
  Antisense Oligonucleotide
atcagctccaactacca

SEQ ID NO: 854 - DNA, 17 bp, Artificial Sequence
  Antisense Oligonucleotide
catcagctccaactacc

SEQ ID NO: 855 - DNA, 17 bp, Artificial Sequence
  Antisense Oligonucleotide
ccatcagctccaactac

SEQ ID NO: 856 - DNA, 17 bp, Artificial Sequence
  Antisense Oligonucleotide
gccatcagctccaacta

SEQ ID NO: 857 - DNA, 17 bp, Artificial Sequence
  Antisense Oligonucleotide
cgccatcagctccaact

SEQ ID NO: 858 - DNA, 17 bp, Artificial Sequence
  Antisense Oligonucleotide
acgccatcagctccaac

SEQ ID NO: 859 - DNA, 17 bp, Artificial Sequence
  Antisense Oligonucleotide
tacgccatcagctccaa

SEQ ID NO: 860 - DNA, 17 bp, Artificial Sequence
  Antisense Oligonucleotide
ctacgccatcagctcca

SEQ ID NO: 861 - DNA, 17 bp, Artificial Sequence
  Antisense Oligonucleotide
cctacgccatcagctcc

SEQ ID NO: 862 - DNA, 17 bp, Artificial Sequence
  Antisense Oligonucleotide
gcctacgccatcagctc

SEQ ID NO: 863 - DNA, 17 bp, Artificial Sequence
  Antisense Oligonucleotide
tgcctacgccatcagct

SEQ ID NO: 864 - DNA, 17 bp, Artificial Sequence
  Antisense Oligonucleotide
ttgcctacgccatcagc

SEQ ID NO: 865 - DNA, 17 bp, Artificial Sequence
  Antisense Oligonucleotide
cttgcctacgccatcag

SEQ ID NO: 866 - DNA, 17 bp, Artificial Sequence
  Antisense Oligonucleotide
tcttgcctacgccatca

SEQ ID NO: 867 - DNA, 17 bp, Artificial Sequence
  Antisense Oligonucleotide
ctcttgcctacgccatc

SEQ ID NO: 868 - DNA, 17 bp, Artificial Sequence
  Antisense Oligonucleotide
actcttgcctacgccat

SEQ ID NO: 869 - DNA, 20 bp, Artificial Sequence
  Antisense Oligonucleotide
tcagctccaactaccacaag

SEQ ID NO: 870 - DNA, 20 bp, Artificial Sequence
  Antisense Oligonucleotide
atcagctccaactaccacaa

SEQ ID NO: 871 - DNA, 20 bp, Artificial Sequence
  Antisense Oligonucleotide
catcagctccaactaccaca

SEQ ID NO: 872 - DNA, 20 bp, Artificial Sequence
  Antisense Oligonucleotide
ccatcagctccaactaccac

SEQ ID NO: 873 - DNA, 20 bp, Artificial Sequence
  Antisense Oligonucleotide
gccatcagctccaactacca

SEQ ID NO: 874 - DNA, 20 bp, Artificial Sequence
  Antisense Oligonucleotide
cgccatcagctccaactacc

SEQ ID NO: 875 - DNA, 20 bp, Artificial Sequence
  Antisense Oligonucleotide
acgccatcagctccaactac

SEQ ID NO: 876 - DNA, 20 bp, Artificial Sequence
  Antisense Oligonucleotide
tacgccatcagctccaacta

SEQ ID NO: 877 - DNA, 20 bp, Artificial Sequence
  Antisense Oligonucleotide
ctacgccatcagctccaact

SEQ ID NO: 878 - DNA, 20 bp, Artificial Sequence
  Antisense Oligonucleotide
cctacgccatcagctccaac

SEQ ID NO: 879 - DNA, 20 bp, Artificial Sequence
  Antisense Oligonucleotide
gcctacgccatcagctccaa

SEQ ID NO: 880 - DNA, 20 bp, Artificial Sequence
  Antisense Oligonucleotide
tgcctacgccatcagctcca

SEQ ID NO: 881 - DNA, 20 bp, Artificial Sequence
  Antisense Oligonucleotide
ttgcctacgccatcagctcc

SEQ ID NO: 882 - DNA, 20 bp, Artificial Sequence
  Antisense Oligonucleotide
cttgcctacgccatcagctc

SEQ ID NO: 883 - DNA, 20 bp, Artificial Sequence
  Antisense Oligonucleotide
tcttgcctacgccatcagct

SEQ ID NO: 884 - DNA, 20 bp, Artificial Sequence
  Antisense Oligonucleotide
ctcttgcctacgccatcagc

SEQ ID NO: 885 - DNA, 20 bp, Artificial Sequence
  Antisense Oligonucleotide
actcttgcctacgccatcag

SEQ ID NO: 886 - DNA, 20 bp, Artificial Sequence
  Antisense Oligonucleotide
cactcttgcctacgccatca

SEQ ID NO: 887 - DNA, 20 bp, Artificial Sequence
  Antisense Oligonucleotide
gcactcttgcctacgccatc

SEQ ID NO: 888 - DNA, 20 bp, Artificial Sequence
  Antisense Oligonucleotide
ggcactcttgcctacgccat

SEQ ID NO: 889 - DNA, 17 bp, Artificial Sequence
  Antisense Oligonucleotide
ggtaggcgcctcagtcg

SEQ ID NO: 890 - DNA, 20 bp, Artificial Sequence
  Antisense Oligonucleotide
ggtaggcgcctcagtcgtat

SEQ ID NO: 891 - DNA, 20 bp, Artificial Sequence
  Antisense Oligonucleotide
aggtaggcgcctcagtcgta

SEQ ID NO: 892 - DNA, 15 bp, Artificial Sequence
  Antisense Oligonucleotide
atttgttgacgggtc

SEQ ID NO: 893 - DNA, 20 bp, Artificial Sequence
  Antisense Oligonucleotide
gattctttgctggccgcata

SEQ ID NO: 894 - DNA, 20 bp, Artificial Sequence
  Antisense Oligonucleotide
cgtagattgtgctgatagag

SEQ ID NO: 895 - DNA, 17 bp, Artificial Sequence
  Antisense Oligonucleotide
gtaggcgcctcagtcgt

SEQ ID NO: 896 - DNA, 20 bp, Artificial Sequence
  Antisense Oligonucleotide
caggtaggcgcctcagtcgt

SEQ ID NO: 897 - DNA, 20 bp, Artificial Sequence
  Antisense Oligonucleotide
cgccagctcactcacgatgc

SEQ ID NO: 898 - DNA, 16 bp, Artificial Sequence
  Antisense Oligonucleotide
cgtactccatcgctga

SEQ ID NO: 899 - DNA, 20 bp, Artificial Sequence
  Antisense Oligonucleotide
tagtcagctgctcgatgctc

SEQ ID NO: 900 - DNA, 16 bp, Artificial Sequence
  Antisense Oligonucleotide
taggcgcctcagtcgt

SEQ ID NO: 901 - DNA, 16 bp, Artificial Sequence
  Antisense Oligonucleotide
cacaattggctcggcc

SEQ ID NO: 902 - DNA, 20 bp, Artificial Sequence
  Antisense Oligonucleotide
cacgtactccatcgctgaca

SEQ ID NO: 903 - DNA, 20 bp, Artificial Sequence
  Antisense Oligonucleotide
cgacaatactttccgaatgc

SEQ ID NO: 904 - DNA, 15 bp, Artificial Sequence
  Antisense Oligonucleotide
cgacaatactttccg

SEQ ID NO: 905 - DNA, 20 bp, Artificial Sequence
  Antisense Oligonucleotide
aagcggctatactgctggtc

SEQ ID NO: 906 - DNA, 17 bp, Artificial Sequence
  Antisense Oligonucleotide
gccgacaatactttccg

SEQ ID NO: 907 - DNA, 15 bp, Artificial Sequence
  Antisense Oligonucleotide
acgtactccatcgct

SEQ ID NO: 908 - DNA, 20 bp, Artificial Sequence
  Antisense Oligonucleotide
gtaggcgcctcagtcgtatc

SEQ ID NO: 909 - DNA, 20 bp, Artificial Sequence
  Antisense Oligonucleotide
aggcaccgggccacaatccg

SEQ ID NO: 910 - DNA, 20 bp, Artificial Sequence
  Antisense Oligonucleotide
cgatgctcagtcctcgcttg

SEQ ID NO: 911 - DNA, 16 bp, Artificial Sequence
  Antisense Oligonucleotide
atcggccggtgctgta

SEQ ID NO: 912 - DNA, 17 bp, Artificial Sequence
  Antisense Oligonucleotide
taggcgcctcagtcgta

SEQ ID NO: 913 - DNA, 20 bp, Artificial Sequence
  Antisense Oligonucleotide
agttttctagccgatctagg

SEQ ID NO: 914 - DNA, 20 bp, Artificial Sequence
  Antisense Oligonucleotide
ccgacaatactttccgaatg

SEQ ID NO: 915 - DNA, 20 bp, Artificial Sequence
  Antisense Oligonucleotide
aatccgggcaatctccattg

SEQ ID NO: 916 - DNA, 16 bp, Artificial Sequence
  Antisense Oligonucleotide
cgggcaatctccattg

SEQ ID NO: 917 - DNA, 20 bp, Artificial Sequence
  Antisense Oligonucleotide
taatttgttgacgggtctga

SEQ ID NO: 918 - DNA, 20 bp, Artificial Sequence
  Antisense Oligonucleotide
tgtagtcagctgctcgatgc

SEQ ID NO: 919 - DNA, 20 bp, Artificial Sequence
  Antisense Oligonucleotide
tgattcttcgtagattgtgc

SEQ ID NO: 920 - DNA, 17 bp, Artificial Sequence
  Antisense Oligonucleotide
acgtactccatcgctga

SEQ ID NO: 921 - DNA, 20 bp, Artificial Sequence
  Antisense Oligonucleotide
gtagtcagctgctcgatgct

SEQ ID NO: 922 - DNA, 20 bp, Artificial Sequence
  Antisense Oligonucleotide
tggctctctggccgacaata

SEQ ID NO: 923 - DNA, 20 bp, Artificial Sequence
  Antisense Oligonucleotide
ttgttgacgggtctgaagtt

SEQ ID NO: 924 - DNA, 20 bp, Artificial Sequence
  Antisense Oligonucleotide
tagtgaactggacgccggtc

SEQ ID NO: 925 - DNA, 20 bp, Artificial Sequence
  Antisense Oligonucleotide
gtagtgaactggacgccggt

SEQ ID NO: 926 - DNA, 20 bp, Artificial Sequence
  Antisense Oligonucleotide
gccacaatccgggcaatctc

SEQ ID NO: 927 - DNA, 16 bp, Artificial Sequence
  Antisense Oligonucleotide
gaactggacgccggtc

SEQ ID NO: 928 - DNA, 20 bp, Artificial Sequence
  Antisense Oligonucleotide
gacgggtctgaagttgagat

SEQ ID NO: 929 - DNA, 15 bp, Artificial Sequence
  Antisense Oligonucleotide
gaactggacgccggt

SEQ ID NO: 930 - DNA, 17 bp, Artificial Sequence
  Antisense Oligonucleotide
atcggccggtgctgtac

SEQ ID NO: 931 - DNA, 20 bp, Artificial Sequence
  Antisense Oligonucleotide
aagcatcacaattggctcgg

SEQ ID NO: 932 - DNA, 15 bp, Artificial Sequence
  Antisense Oligonucleotide
gcgcctcagtcgtat

SEQ ID NO: 933 - DNA, 20 bp, Artificial Sequence
  Antisense Oligonucleotide
gcttgattcttcgtagattg

SEQ ID NO: 934 - DNA, 20 bp, Artificial Sequence
  Antisense Oligonucleotide
ggctctctggccgacaatac

SEQ ID NO: 935 - DNA, 20 bp, Artificial Sequence
  Antisense Oligonucleotide
cagtgtagtcagctgctcga

SEQ ID NO: 936 - DNA, 20 bp, Artificial Sequence
  Antisense Oligonucleotide
acgtactccatcgctgacaa

SEQ ID NO: 937 - DNA, 20 bp, Artificial Sequence
  Antisense Oligonucleotide
atccgggcaatctccattgg

SEQ ID NO: 938 - DNA, 20 bp, Artificial Sequence
  Antisense Oligonucleotide
ggttccacggactggatctg

SEQ ID NO: 939 - DNA, 20 bp, Artificial Sequence
  Antisense Oligonucleotide
gcatcacaattggctcggcc

SEQ ID NO: 940 - DNA, 20 bp, Artificial Sequence
  Antisense Oligonucleotide
gccgatctaggcagatgttg

SEQ ID NO: 941 - DNA, 20 bp, Artificial Sequence
  Antisense Oligonucleotide
gcacgtactccatcgctgac

SEQ ID NO: 942 - DNA, 15 bp, Artificial Sequence
  Antisense Oligonucleotide
actggacgccggtct

SEQ ID NO: 943 - DNA, 20 bp, Artificial Sequence
  Antisense Oligonucleotide
catcggccggtgctgtacaa

SEQ ID NO: 944 - DNA, 16 bp, Artificial Sequence
  Antisense Oligonucleotide
actggacgccggtctt

SEQ ID NO: 945 - DNA, 15 bp, Artificial Sequence
  Antisense Oligonucleotide
ggcgcctcagtcgta

SEQ ID NO: 946 - DNA, 20 bp, Artificial Sequence
  Antisense Oligonucleotide
gccgacaatactttccgaat

SEQ ID NO: 947 - DNA, 15 bp, Artificial Sequence
  Antisense Oligonucleotide
ggacgccggtcttga

SEQ ID NO: 948 - DNA, 17 bp, Artificial Sequence
  Antisense Oligonucleotide
tagtgaactggacgccg

SEQ ID NO: 949 - DNA, 20 bp, Artificial Sequence
  Antisense Oligonucleotide
ggcaccgggccacaatccgg

SEQ ID NO: 950 - DNA, 20 bp, Artificial Sequence
  Antisense Oligonucleotide
cgtactccatcgctgacaaa

SEQ ID NO: 951 - DNA, 17 bp, Artificial Sequence
  Antisense Oligonucleotide
catcggccggtgctgta

SEQ ID NO: 952 - DNA, 20 bp, Artificial Sequence
  Antisense Oligonucleotide
cggccggtgctgtacaatgg

SEQ ID NO: 953 - DNA, 20 bp, Artificial Sequence
  Antisense Oligonucleotide
gcggctatactgctggtcaa

SEQ ID NO: 954 - DNA, 20 bp, Artificial Sequence
  Antisense Oligonucleotide
atgttaaatttccgggatcc

SEQ ID NO: 955 - DNA, 15 bp, Artificial Sequence
  Antisense Oligonucleotide
cgccggtcttgatga

SEQ ID NO: 956 - DNA, 20 bp, Artificial Sequence
  Antisense Oligonucleotide
ctggccgacaatactttccg

SEQ ID NO: 957 - DNA, 15 bp, Artificial Sequence
  Antisense Oligonucleotide
aactggacgccggtc

SEQ ID NO: 958 - DNA, 16 bp, Artificial Sequence
  Antisense Oligonucleotide
aactggacgccggtct

SEQ ID NO: 959 - DNA, 20 bp, Artificial Sequence
  Antisense Oligonucleotide
caccgggccacaatccgggc

SEQ ID NO: 960 - DNA, 20 bp, Artificial Sequence
  Antisense Oligonucleotide
tggccgacaatactttccga

SEQ ID NO: 961 - DNA, 20 bp, Artificial Sequence
  Antisense Oligonucleotide
gtgctcaagatggcccgctc

SEQ ID NO: 962 - DNA, 20 bp, Artificial Sequence
  Antisense Oligonucleotide
tcgctgacaaaagccccgcc

SEQ ID NO: 963 - DNA, 20 bp, Artificial Sequence
  Antisense Oligonucleotide
acaatccgggcaatctccat

SEQ ID NO: 964 - DNA, 20 bp, Artificial Sequence
  Antisense Oligonucleotide
ggccggtgctgtacaatggg

SEQ ID NO: 965 - DNA, 15 bp, Artificial Sequence
  Antisense Oligonucleotide
tggacgccggtcttg

SEQ ID NO: 966 - DNA, 20 bp, Artificial Sequence
  Antisense Oligonucleotide
atcgctgacaaaagccccgc

SEQ ID NO: 967 - DNA, 20 bp, Artificial Sequence
  Antisense Oligonucleotide
gcatcggccggtgctgtaca

SEQ ID NO: 968 - DNA, 20 bp, Artificial Sequence
  Antisense Oligonucleotide
accgggccacaatccgggca

SEQ ID NO: 969 - DNA, 20 bp, Artificial Sequence
  Antisense Oligonucleotide
atcggccggtgctgtacaat

SEQ ID NO: 970 - DNA, 20 bp, Artificial Sequence
  Antisense Oligonucleotide
aattggctcggcccccattc

SEQ ID NO: 971 - DNA, 20 bp, Artificial Sequence
  Antisense Oligonucleotide
tgcacgtactccatcgctga

SEQ ID NO: 972 - DNA, 20 bp, Artificial Sequence
  Antisense Oligonucleotide
cgggccacaatccgggcaat

SEQ ID NO: 973 - DNA, 20 bp, Artificial Sequence
  Antisense Oligonucleotide
aggcgcctcagtcgtatctt

SEQ ID NO: 974 - DNA, 20 bp, Artificial Sequence
  Antisense Oligonucleotide
ggcgcctcagtcgtatcttt

SEQ ID NO: 975 - DNA, 20 bp, Artificial Sequence
  Antisense Oligonucleotide
catcgctgacaaaagccccg

SEQ ID NO: 976 - DNA, 20 bp, Artificial Sequence
  Antisense Oligonucleotide
tccgcatctggtccagcgca

SEQ ID NO: 977 - DNA, 20 bp, Artificial Sequence
  Antisense Oligonucleotide
cgatgcttctccgcatctgg

SEQ ID NO: 978 - DNA, 20 bp, Artificial Sequence
  Antisense Oligonucleotide
ggccgacaatactttccgaa

SEQ ID NO: 979 - DNA, 20 bp, Artificial Sequence
  Antisense Oligonucleotide
ccgggccacaatccgggcaa

SEQ ID NO: 980 - DNA, 20 bp, Artificial Sequence
  Antisense Oligonucleotide
ccgatctaggcagatgttgg

SEQ ID NO: 981 - DNA, 17 bp, Artificial Sequence
  Antisense Oligonucleotide
accgggccacaatccgg

SEQ ID NO: 982 - DNA, 20 bp, Artificial Sequence
  Antisense Oligonucleotide
gccggtgctgtacaatgggg

SEQ ID NO: 983 - DNA, 20 bp, Artificial Sequence
  Antisense Oligonucleotide
ggccacaatccgggcaatct

SEQ ID NO: 984 - DNA, 20 bp, Artificial Sequence
  Antisense Oligonucleotide
ggacctcggccacttgatcc

SEQ ID NO: 985 - DNA, 20 bp, Artificial Sequence
  Antisense Oligonucleotide
agcatcggccggtgctgtac

SEQ ID NO: 986 - DNA, 16 bp, Artificial Sequence
  Antisense Oligonucleotide
tagccgatctaggcag

SEQ ID NO: 987 - DNA, 15 bp, Artificial Sequence
  Antisense Oligonucleotide
tagccgatctaggca

SEQ ID NO: 988 - DNA, 20 bp, Artificial Sequence
  Antisense Oligonucleotide
cggtgctgtacaatggggtc

SEQ ID NO: 989 - DNA, 15 bp, Artificial Sequence
  Antisense Oligonucleotide
gattgtcagtgcgct

SEQ ID NO: 990 - DNA, 15 bp, Artificial Sequence
  Antisense Oligonucleotide
ggattgtcagtgcgc

SEQ ID NO: 991 - DNA, 15 bp, Artificial Sequence
  Antisense Oligonucleotide
gagtcttttactcgc

SEQ ID NO: 992 - DNA, 15 bp, Artificial Sequence
  Antisense Oligonucleotide
cggtactggcgtatt

SEQ ID NO: 993 - DNA, 15 bp, Artificial Sequence
  Antisense Oligonucleotide
tcggtactggcgtat

SEQ ID NO: 994 - DNA, 15 bp, Artificial Sequence
  Antisense Oligonucleotide
ttcggtactggcgta

SEQ ID NO: 995 - DNA, 15 bp, Artificial Sequence
  Antisense Oligonucleotide
attcggtactggcgt

SEQ ID NO: 996 - DNA, 15 bp, Artificial Sequence
  Antisense Oligonucleotide
ccggctaattgtaac

SEQ ID NO: 997 - DNA, 16 bp, Artificial Sequence
  Antisense Oligonucleotide
tcggtactggcgtatt

SEQ ID NO: 998 - DNA, 16 bp, Artificial Sequence
  Antisense Oligonucleotide
ttcggtactggcgtat

SEQ ID NO: 999 - DNA, 16 bp, Artificial Sequence
  Antisense Oligonucleotide
attcggtactggcgta

SEQ ID NO: 1000 - DNA, 17 bp, Artificial Sequence
  Antisense Oligonucleotide
cggtactggcgtatttc

SEQ ID NO: 1001 - DNA, 17 bp, Artificial Sequence
  Antisense Oligonucleotide
tcggtactggcgtattt

SEQ ID NO: 1002 - DNA, 17 bp, Artificial Sequence
  Antisense Oligonucleotide
ttcggtactggcgtatt

SEQ ID NO: 1003 - DNA, 17 bp, Artificial Sequence
  Antisense Oligonucleotide
attcggtactggcgtat

SEQ ID NO: 1004 - DNA, 17 bp, Artificial Sequence
  Antisense Oligonucleotide
cattcggtactggcgta

SEQ ID NO: 1005 - DNA, 17 bp, Artificial Sequence
  Antisense Oligonucleotide
tcattcggtactggcgt

SEQ ID NO: 1006 - DNA, 20 bp, Artificial Sequence
  Antisense Oligonucleotide
ccaccagtttgtactcagtc

SEQ ID NO: 1007 - DNA, 20 bp, Artificial Sequence
  Antisense Oligonucleotide
ggattgtcagtgcgcttttc

SEQ ID NO: 1008 - DNA, 20 bp, Artificial Sequence
  Antisense Oligonucleotide
gctggattgtcagtgcgctt

SEQ ID NO: 1009 - DNA, 20 bp, Artificial Sequence
  Antisense Oligonucleotide
agctggattgtcagtgcgct

SEQ ID NO: 1010 - DNA, 20 bp, Artificial Sequence
  Antisense Oligonucleotide
tagctggattgtcagtgcgc

SEQ ID NO: 1011 - DNA, 20 bp, Artificial Sequence
  Antisense Oligonucleotide
attagctggattgtcagtgc

SEQ ID NO: 1012 - DNA, 20 bp, Artificial Sequence
  Antisense Oligonucleotide
gtattggtctctcatggcac

SEQ ID NO: 1013 - DNA, 20 bp, Artificial Sequence
  Antisense Oligonucleotide
gcctgtcctcatgtattggt

SEQ ID NO: 1014 - DNA, 20 bp, Artificial Sequence
  Antisense Oligonucleotide
cgcctgtcctcatgtattgg

SEQ ID NO: 1015 - DNA, 20 bp, Artificial Sequence
  Antisense Oligonucleotide
cttcgcctgtcctcatgtat

SEQ ID NO: 1016 - DNA, 20 bp, Artificial Sequence
  Antisense Oligonucleotide
gacttgctattattgatggc

SEQ ID NO: 1017 - DNA, 20 bp, Artificial Sequence
  Antisense Oligonucleotide
tgacttgctattattgatgg

SEQ ID NO: 1018 - DNA, 20 bp, Artificial Sequence
  Antisense Oligonucleotide
atccgcaaatgacttgctat

SEQ ID NO: 1019 - DNA, 20 bp, Artificial Sequence
  Antisense Oligonucleotide
tatccgcaaatgacttgcta

SEQ ID NO: 1020 - DNA, 20 bp, Artificial Sequence
  Antisense Oligonucleotide
tagaggttaatatccgcaaa

SEQ ID NO: 1021 - DNA, 20 bp, Artificial Sequence
  Antisense Oligonucleotide
gtagaggttaatatccgcaa

SEQ ID NO: 1022 - DNA, 20 bp, Artificial Sequence
  Antisense Oligonucleotide
tgtagaggttaatatccgca

SEQ ID NO: 1023 - DNA, 20 bp, Artificial Sequence
  Antisense Oligonucleotide
ctgtagaggttaatatccgc

SEQ ID NO: 1024 - DNA, 20 bp, Artificial Sequence
  Antisense Oligonucleotide
tgctccctgtagaggttaat

SEQ ID NO: 1025 - DNA, 20 bp, Artificial Sequence
  Antisense Oligonucleotide
tactcgcttaatctgctccc

SEQ ID NO: 1026 - DNA, 20 bp, Artificial Sequence
  Antisense Oligonucleotide
ttactcgcttaatctgctcc

SEQ ID NO: 1027 - DNA, 20 bp, Artificial Sequence
  Antisense Oligonucleotide
gagtcttttactcgcttaat

SEQ ID NO: 1028 - DNA, 20 bp, Artificial Sequence
  Antisense Oligonucleotide
atcaactgtccttgttggca

SEQ ID NO: 1029 - DNA, 20 bp, Artificial Sequence
  Antisense Oligonucleotide
gccagttcgtgggcttgttt

SEQ ID NO: 1030 - DNA, 20 bp, Artificial Sequence
  Antisense Oligonucleotide
ggccagttcgtgggcttgtt

SEQ ID NO: 1031 - DNA, 20 bp, Artificial Sequence
  Antisense Oligonucleotide
actcttggccagttcgtggg

SEQ ID NO: 1032 - DNA, 20 bp, Artificial Sequence
  Antisense Oligonucleotide
aactcttggccagttcgtgg

SEQ ID NO: 1033 - DNA, 20 bp, Artificial Sequence
  Antisense Oligonucleotide
taactcttggccagttcgtg

SEQ ID NO: 1034 - DNA, 20 bp, Artificial Sequence
  Antisense Oligonucleotide
cgtaactcttggccagttcg

SEQ ID NO: 1035 - DNA, 20 bp, Artificial Sequence
  Antisense Oligonucleotide
tggaatcccgtaactcttgg

SEQ ID NO: 1036 - DNA, 20 bp, Artificial Sequence
  Antisense Oligonucleotide
aatggaatcccgtaactctt

SEQ ID NO: 1037 - DNA, 20 bp, Artificial Sequence
  Antisense Oligonucleotide
gaatggaatcccgtaactct

SEQ ID NO: 1038 - DNA, 20 bp, Artificial Sequence
  Antisense Oligonucleotide
tgaatggaatcccgtaactc

SEQ ID NO: 1039 - DNA, 20 bp, Artificial Sequence
  Antisense Oligonucleotide
atgaatggaatcccgtaact

SEQ ID NO: 1040 - DNA, 20 bp, Artificial Sequence
  Antisense Oligonucleotide
caatgaatggaatcccgtaa

SEQ ID NO: 1041 - DNA, 20 bp, Artificial Sequence
  Antisense Oligonucleotide
gcgtatttctcttaccagtg

SEQ ID NO: 1042 - DNA, 20 bp, Artificial Sequence
  Antisense Oligonucleotide
ggtactggcgtatttctctt

SEQ ID NO: 1043 - DNA, 20 bp, Artificial Sequence
  Antisense Oligonucleotide
cggtactggcgtatttctct

SEQ ID NO: 1044 - DNA, 20 bp, Artificial Sequence
  Antisense Oligonucleotide
tcggtactggcgtatttctc

SEQ ID NO: 1045 - DNA, 20 bp, Artificial Sequence
  Antisense Oligonucleotide
ttcggtactggcgtatttct

SEQ ID NO: 1046 - DNA, 20 bp, Artificial Sequence
  Antisense Oligonucleotide
attcggtactggcgtatttc

SEQ ID NO: 1047 - DNA, 20 bp, Artificial Sequence
  Antisense Oligonucleotide
cattcggtactggcgtattt

SEQ ID NO: 1048 - DNA, 20 bp, Artificial Sequence
  Antisense Oligonucleotide
tcattcggtactggcgtatt

SEQ ID NO: 1049 - DNA, 20 bp, Artificial Sequence
  Antisense Oligonucleotide
ttcattcggtactggcgtat

SEQ ID NO: 1050 - DNA, 20 bp, Artificial Sequence
  Antisense Oligonucleotide
tttcattcggtactggcgta

SEQ ID NO: 1051 - DNA, 20 bp, Artificial Sequence
  Antisense Oligonucleotide
ttttcattcggtactggcgt

SEQ ID NO: 1052 - DNA, 20 bp, Artificial Sequence
  Antisense Oligonucleotide
ttttttcattcggtactggc

SEQ ID NO: 1053 - DNA, 20 bp, Artificial Sequence
  Antisense Oligonucleotide
gttttttcattcggtactgg

SEQ ID NO: 1054 - DNA, 20 bp, Artificial Sequence
  Antisense Oligonucleotide
agttttttcattcggtactg

SEQ ID NO: 1055 - DNA, 20 bp, Artificial Sequence
  Antisense Oligonucleotide
gtatcttgttacatcaccac

SEQ ID NO: 1056 - DNA, 20 bp, Artificial Sequence
  Antisense Oligonucleotide
agtatcttgttacatcacca

SEQ ID NO: 1057 - DNA, 20 bp, Artificial Sequence
  Antisense Oligonucleotide
gtgcagcttgaaagtggctc

SEQ ID NO: 1058 - DNA, 20 bp, Artificial Sequence
  Antisense Oligonucleotide
gtactaaactactgagagct

SEQ ID NO: 1059 - DNA, 20 bp, Artificial Sequence
  Antisense Oligonucleotide
tgtactaaactactgagagc

SEQ ID NO: 1060 - DNA, 20 bp, Artificial Sequence
  Antisense Oligonucleotide
gggagtaacaagaggtgcat

SEQ ID NO: 1061 - DNA, 20 bp, Artificial Sequence
  Antisense Oligonucleotide
aacagggagtaacaagaggt

SEQ ID NO: 1062 - DNA, 20 bp, Artificial Sequence
  Antisense Oligonucleotide
gttgctactttagagctcaa

SEQ ID NO: 1063 - DNA, 20 bp, Artificial Sequence
  Antisense Oligonucleotide
cagttgctactttagagctc

SEQ ID NO: 1064 - DNA, 20 bp, Artificial Sequence
  Antisense Oligonucleotide
gaaagttggatttaattacg

SEQ ID NO: 1065 - DNA, 20 bp, Artificial Sequence
  Antisense Oligonucleotide
gcatctgctctcaaatagat

SEQ ID NO: 1066 - DNA, 20 bp, Artificial Sequence
  Antisense Oligonucleotide
tataggtagtaacctatgaa

SEQ ID NO: 1067 - DNA, 20 bp, Artificial Sequence
  Antisense Oligonucleotide
gtataggtagtaacctatga

SEQ ID NO: 1068 - DNA, 20 bp, Artificial Sequence
  Antisense Oligonucleotide
attgtataggtagtaaccta

SEQ ID NO: 1069 - DNA, 20 bp, Artificial Sequence
  Antisense Oligonucleotide
cattgtataggtagtaacct

SEQ ID NO: 1070 - DNA, 20 bp, Artificial Sequence
  Antisense Oligonucleotide
acattgtataggtagtaacc

SEQ ID NO: 1071 - DNA, 20 bp, Artificial Sequence
  Antisense Oligonucleotide
ccctggtccattagcaccat

SEQ ID NO: 1072 - DNA, 20 bp, Artificial Sequence
  Antisense Oligonucleotide
accctggtccattagcacca

SEQ ID NO: 1073 - DNA, 20 bp, Artificial Sequence
  Antisense Oligonucleotide
gaccctggtccattagcacc

SEQ ID NO: 1074 - DNA, 20 bp, Artificial Sequence
  Antisense Oligonucleotide
tgaccctggtccattagcac

SEQ ID NO: 1075 - DNA, 20 bp, Artificial Sequence
  Antisense Oligonucleotide
ctgtgaccctggtccattag

SEQ ID NO: 1076 - DNA, 20 bp, Artificial Sequence
  Antisense Oligonucleotide
aaactgtgaccctggtccat

SEQ ID NO: 1077 - DNA, 20 bp, Artificial Sequence
  Antisense Oligonucleotide
gtaaagggtttgtgctaact

SEQ ID NO: 1078 - DNA, 20 bp, Artificial Sequence
  Antisense Oligonucleotide
ggtaaagggtttgtgctaac

SEQ ID NO: 1079 - DNA, 20 bp, Artificial Sequence
  Antisense Oligonucleotide
ccagtcatggtaaagggttt

SEQ ID NO: 1080 - DNA, 20 bp, Artificial Sequence
  Antisense Oligonucleotide
taccagggtattatctgcaa

SEQ ID NO: 1081 - DNA, 20 bp, Artificial Sequence
  Antisense Oligonucleotide
attaccagggtattatctgc

SEQ ID NO: 1082 - DNA, 20 bp, Artificial Sequence
  Antisense Oligonucleotide
ctgaggtgataagcctcagg

SEQ ID NO: 1083 - DNA, 20 bp, Artificial Sequence
  Antisense Oligonucleotide
actgaggtgataagcctcag

SEQ ID NO: 1084 - DNA, 20 bp, Artificial Sequence
  Antisense Oligonucleotide
gactgaggtgataagcctca

SEQ ID NO: 1085 - DNA, 20 bp, Artificial Sequence
  Antisense Oligonucleotide
catacaagggctattggcac

SEQ ID NO: 1086 - DNA, 20 bp, Artificial Sequence
  Antisense Oligonucleotide
gactaaacatgggcccacta

SEQ ID NO: 1087 - DNA, 20 bp, Artificial Sequence
  Antisense Oligonucleotide
tccatcttaggtcagtactc

SEQ ID NO: 1088 - DNA, 20 bp, Artificial Sequence
  Antisense Oligonucleotide
gtcttacaacttccacggac

SEQ ID NO: 1089 - DNA, 20 bp, Artificial Sequence
  Antisense Oligonucleotide
tcgaagtactcggcgtaggt

SEQ ID NO: 1090 - DNA, 20 bp, Artificial Sequence
  Antisense Oligonucleotide
aacccagggtcggactcgat

SEQ ID NO: 1091 - DNA, 20 bp, Artificial Sequence
  Antisense Oligonucleotide
gcaagatcccggattcggtc

SEQ ID NO: 1092 - DNA, 20 bp, Artificial Sequence
  Antisense Oligonucleotide
gacgtggcacctcttgagga

SEQ ID NO: 1093 - DNA, 18 bp, Artificial Sequence
  Antisense Oligonucleotide
gctattaccttaacccag
